United States Patent Application Publication US 2024/0271134 A1 - sequence listing, part 2

SEQ ID NO: 28947 - DNA, 17 bp, synthetic construct
  source 1..17: mol_type = other DNA
tttgacatatctctgca

SEQ ID NO: 28948 - DNA, 17 bp, synthetic construct
  source 1..17: mol_type = other DNA
ggcattttgacatatct

SEQ ID NO: 28949 - DNA, 17 bp, synthetic construct
  source 1..17: mol_type = other DNA
gggcattttgacatatc

SEQ ID NO: 28950 - DNA, 17 bp, synthetic construct
  source 1..17: mol_type = other DNA
ggggcattttgacatat

SEQ ID NO: 28951 - DNA, 17 bp, synthetic construct
  source 1..17: mol_type = other DNA
aggggcattttgacata

SEQ ID NO: 28952 - DNA, 17 bp, synthetic construct
  source 1..17: mol_type = other DNA
caggggcattttgacat

SEQ ID NO: 28953 - DNA, 17 bp, synthetic construct
  source 1..17: mol_type = other DNA
acaggggcattttgaca

SEQ ID NO: 28954 - DNA, 17 bp, synthetic construct
  source 1..17: mol_type = other DNA
tacaggggcattttgac

SEQ ID NO: 28955 - DNA, 17 bp, synthetic construct
  source 1..17: mol_type = other DNA
ctacaggggcattttga

SEQ ID NO: 28956 - DNA, 17 bp, synthetic construct
  source 1..17: mol_type = other DNA
cctacaggggcattttg

SEQ ID NO: 28957 - DNA, 17 bp, synthetic construct
  source 1..17: mol_type = other DNA
gcctacaggggcatttt

SEQ ID NO: 28958 - DNA, 17 bp, synthetic construct
  source 1..17: mol_type = other DNA
tgcctacaggggcattt

SEQ ID NO: 28959 - DNA, 17 bp, synthetic construct
  source 1..17: mol_type = other DNA
ttgcctacaggggcatt

SEQ ID NO: 28960 - DNA, 17 bp, synthetic construct
  source 1..17: mol_type = other DNA
cttgcctacaggggcat

SEQ ID NO: 28961 - DNA, 17 bp, synthetic construct
  source 1..17: mol_type = other DNA
aggcttgcctacagggg

SEQ ID NO: 28962 - DNA, 17 bp, synthetic construct
  source 1..17: mol_type = other DNA
taggcttgcctacaggg

SEQ ID NO: 28963 - DNA, 17 bp, synthetic construct
  source 1..17: mol_type = other DNA
gtaggcttgcctacagg

SEQ ID NO: 28964 - DNA, 17 bp, synthetic construct
  source 1..17: mol_type = other DNA
tgtaggcttgcctacag

SEQ ID NO: 28965 - DNA, 17 bp, synthetic construct
  source 1..17: mol_type = other DNA
gtgtaggcttgcctaca

SEQ ID NO: 28966 - DNA, 17 bp, synthetic construct
  source 1..17: mol_type = other DNA
tgtgtaggcttgcctac

SEQ ID NO: 28967 - DNA, 17 bp, synthetic construct
  source 1..17: mol_type = other DNA
ttgtgtaggcttgccta

SEQ ID NO: 28968 - DNA, 17 bp, synthetic construct
  source 1..17: mol_type = other DNA
cttgtgtaggcttgcct

SEQ ID NO: 28969 - DNA, 17 bp, synthetic construct
  source 1..17: mol_type = other DNA
acttgtgtaggcttgcc

SEQ ID NO: 28970 - DNA, 17 bp, synthetic construct
  source 1..17: mol_type = other DNA
tacttgtgtaggcttgc

SEQ ID NO: 28971 - DNA, 17 bp, synthetic construct
  source 1..17: mol_type = other DNA
atacttgtgtaggcttg

SEQ ID NO: 28972 - DNA, 17 bp, synthetic construct
  source 1..17: mol_type = other DNA
aatacttgtgtaggctt

SEQ ID NO: 28973 - DNA, 17 bp, synthetic construct
  source 1..17: mol_type = other DNA
gtaatacttgtgtaggc

SEQ ID NO: 28974 - DNA, 17 bp, synthetic construct
  source 1..17: mol_type = other DNA
gggtattgtgacatatc

SEQ ID NO: 28975 - DNA, 17 bp, synthetic construct
  source 1..17: mol_type = other DNA
ggggtattgtgacatat

SEQ ID NO: 28976 - DNA, 17 bp, synthetic construct
  source 1..17: mol_type = other DNA
gggggtattgtgacata

SEQ ID NO: 28977 - DNA, 17 bp, synthetic construct
  source 1..17: mol_type = other DNA
agggggtattgtgacat

SEQ ID NO: 28978 - DNA, 17 bp, synthetic construct
  source 1..17: mol_type = other DNA
cagggggtattgtgaca

SEQ ID NO: 28979 - DNA, 17 bp, synthetic construct
  source 1..17: mol_type = other DNA
ttacagggggtattgtg

SEQ ID NO: 28980 - DNA, 17 bp, synthetic construct
  source 1..17: mol_type = other DNA
cttacagggggtattgt

SEQ ID NO: 28981 - DNA, 17 bp, synthetic construct
  source 1..17: mol_type = other DNA
gcttacagggggtattg

SEQ ID NO: 28982 - DNA, 17 bp, synthetic construct
  source 1..17: mol_type = other DNA
tgcttacagggggtatt

SEQ ID NO: 28983 - DNA, 17 bp, synthetic construct
  source 1..17: mol_type = other DNA
ctgcttacagggggtat

SEQ ID NO: 28984 - DNA, 17 bp, synthetic construct
  source 1..17: mol_type = other DNA
tctgcttacagggggta

SEQ ID NO: 28985 - DNA, 17 bp, synthetic construct
  source 1..17: mol_type = other DNA
ctctgcttacagggggt

SEQ ID NO: 28986 - DNA, 17 bp, synthetic construct
  source 1..17: mol_type = other DNA
gctctgcttacaggggg

SEQ ID NO: 28987 - DNA, 17 bp, synthetic construct
  source 1..17: mol_type = other DNA
ggctctgcttacagggg

SEQ ID NO: 28988 - DNA, 17 bp, synthetic construct
  source 1..17: mol_type = other DNA
aggctctgcttacaggg

SEQ ID NO: 28989 - DNA, 17 bp, synthetic construct
  source 1..17: mol_type = other DNA
taggctctgcttacagg

SEQ ID NO: 28990 - DNA, 17 bp, synthetic construct
  source 1..17: mol_type = other DNA
ctaggctctgcttacag

SEQ ID NO: 28991 - DNA, 17 bp, synthetic construct
  source 1..17: mol_type = other DNA
tctaggctctgcttaca

SEQ ID NO: 28992 - DNA, 17 bp, synthetic construct
  source 1..17: mol_type = other DNA
gtctaggctctgcttac

SEQ ID NO: 28993 - DNA, 17 bp, synthetic construct
  source 1..17: mol_type = other DNA
tgtctaggctctgctta

SEQ ID NO: 28994 - DNA, 17 bp, synthetic construct
  source 1..17: mol_type = other DNA
ttgtctaggctctgctt

SEQ ID NO: 28995 - DNA, 17 bp, synthetic construct
  source 1..17: mol_type = other DNA
cttgtctaggctctgct

SEQ ID NO: 28996 - DNA, 17 bp, synthetic construct
  source 1..17: mol_type = other DNA
gtcacatatctctgcac

SEQ ID NO: 28997 - DNA, 17 bp, synthetic construct
  source 1..17: mol_type = other DNA
tgtcacatatctctgca

SEQ ID NO: 28998 - DNA, 17 bp, synthetic construct
  source 1..17: mol_type = other DNA
ttgtcacatatctctgc

SEQ ID NO: 28999 - DNA, 17 bp, synthetic construct
  source 1..17: mol_type = other DNA
cttgtcacatatctctg

SEQ ID NO: 29000 - DNA, 17 bp, synthetic construct
  source 1..17: mol_type = other DNA
ccttgtcacatatctct

SEQ ID NO: 29001 - DNA, 17 bp, synthetic construct
  source 1..17: mol_type = other DNA
gccttgtcacatatctc

SEQ ID NO: 29002 - DNA, 17 bp, synthetic construct
  source 1..17: mol_type = other DNA
ggccttgtcacatatct

SEQ ID NO: 29003 - DNA, 17 bp, synthetic construct
  source 1..17: mol_type = other DNA
gggccttgtcacatatc

SEQ ID NO: 29004 - DNA, 17 bp, synthetic construct
  source 1..17: mol_type = other DNA
ggggccttgtcacatat

SEQ ID NO: 29005 - DNA, 17 bp, synthetic construct
  source 1..17: mol_type = other DNA
aggggccttgtcacata

SEQ ID NO: 29006 - DNA, 17 bp, synthetic construct
  source 1..17: mol_type = other DNA
aaggggccttgtcacat

SEQ ID NO: 29007 - DNA, 17 bp, synthetic construct
  source 1..17: mol_type = other DNA
attgtctaggctctgct

SEQ ID NO: 29008 - DNA, 17 bp, synthetic construct
  source 1..17: mol_type = other DNA
tattgtctaggctctgc

SEQ ID NO: 29009 - DNA, 17 bp, synthetic construct
  source 1..17: mol_type = other DNA
ctattgtctaggctctg

SEQ ID NO: 29010 - DNA, 17 bp, synthetic construct
  source 1..17: mol_type = other DNA
actattgtctaggctct

SEQ ID NO: 29011 - DNA, 17 bp, synthetic construct
  source 1..17: mol_type = other DNA
aactattgtctaggctc

SEQ ID NO: 29012 - DNA, 17 bp, synthetic construct
  source 1..17: mol_type = other DNA
actcaggtgatgtaact

SEQ ID NO: 29013 - DNA, 17 bp, synthetic construct
  source 1..17: mol_type = other DNA
cactcaggtgatgtaac

SEQ ID NO: 29014 - DNA, 17 bp, synthetic construct
  source 1..17: mol_type = other DNA
tcactcaggtgatgtaa

SEQ ID NO: 29015 - DNA, 17 bp, synthetic construct
  source 1..17: mol_type = other DNA
atcactcaggtgatgta

SEQ ID NO: 29016 - DNA, 17 bp, synthetic construct
  source 1..17: mol_type = other DNA
gatcactcaggtgatgt

SEQ ID NO: 29017 - DNA, 17 bp, synthetic construct
  source 1..17: mol_type = other DNA
tgatcactcaggtgatg

SEQ ID NO: 29018 - DNA, 17 bp, synthetic construct
  source 1..17: mol_type = other DNA
ctgatcactcaggtgat

SEQ ID NO: 29019 - DNA, 17 bp, synthetic construct
  source 1..17: mol_type = other DNA
actgatcactcaggtga

SEQ ID NO: 29020 - DNA, 17 bp, synthetic construct
  source 1..17: mol_type = other DNA
cactgatcactcaggtg

SEQ ID NO: 29021 - DNA, 17 bp, synthetic construct
  source 1..17: mol_type = other DNA
gcactgatcactcaggt

SEQ ID NO: 29022 - DNA, 17 bp, synthetic construct
  source 1..17: mol_type = other DNA
tgcactgatcactcagg

SEQ ID NO: 29023 - DNA, 17 bp, synthetic construct
  source 1..17: mol_type = other DNA
ctgcactgatcactcag

SEQ ID NO: 29024 - DNA, 17 bp, synthetic construct
  source 1..17: mol_type = other DNA
tctgcactgatcactca

SEQ ID NO: 29025 - DNA, 17 bp, synthetic construct
  source 1..17: mol_type = other DNA
ctctgcactgatcactc

SEQ ID NO: 29026 - DNA, 17 bp, synthetic construct
  source 1..17: mol_type = other DNA
gatctctgcactgatca

SEQ ID NO: 29027 - DNA, 17 bp, synthetic construct
  source 1..17: mol_type = other DNA
agatctctgcactgatc

SEQ ID NO: 29028 - DNA, 17 bp, synthetic construct
  source 1..17: mol_type = other DNA
cagatctctgcactgat

SEQ ID NO: 29029 - DNA, 17 bp, synthetic construct
  source 1..17: mol_type = other DNA
acagatctctgcactga

SEQ ID NO: 29030 - DNA, 17 bp, synthetic construct
  source 1..17: mol_type = other DNA
gacagatctctgcactg

SEQ ID NO: 29031 - DNA, 17 bp, synthetic construct
  source 1..17: mol_type = other DNA
tgacagatctctgcact

SEQ ID NO: 29032 - DNA, 17 bp, synthetic construct
  source 1..17: mol_type = other DNA
gtgacagatctctgcac

SEQ ID NO: 29033 - DNA, 17 bp, synthetic construct
  source 1..17: mol_type = other DNA
tgtgacagatctctgca

SEQ ID NO: 29034 - DNA, 17 bp, synthetic construct
  source 1..17: mol_type = other DNA
ttgtgacagatctctgc

SEQ ID NO: 29035 - DNA, 17 bp, synthetic construct
  source 1..17: mol_type = other DNA
attgtgacagatctctg

SEQ ID NO: 29036 - DNA, 17 bp, synthetic construct
  source 1..17: mol_type = other DNA
aaggggcattgtgacag

SEQ ID NO: 29037 - DNA, 17 bp, synthetic construct
  source 1..17: mol_type = other DNA
aaaggggcattgtgaca

SEQ ID NO: 29038 - DNA, 17 bp, synthetic construct
  source 1..17: mol_type = other DNA
taaaggggcattgtgac

SEQ ID NO: 29039 - DNA, 17 bp, synthetic construct
  source 1..17: mol_type = other DNA
ctaaaggggcattgtga

SEQ ID NO: 29040 - DNA, 17 bp, synthetic construct
  source 1..17: mol_type = other DNA
cctaaaggggcattgtg

SEQ ID NO: 29041 - DNA, 17 bp, synthetic construct
  source 1..17: mol_type = other DNA
gcctaaaggggcattgt

SEQ ID NO: 29042 - DNA, 17 bp, synthetic construct
  source 1..17: mol_type = other DNA
tgcctaaaggggcattg

SEQ ID NO: 29043 - DNA, 17 bp, synthetic construct
  source 1..17: mol_type = other DNA
ctgcctaaaggggcatt

SEQ ID NO: 29044 - DNA, 17 bp, synthetic construct
  source 1..17: mol_type = other DNA
tctgcctaaaggggcat

SEQ ID NO: 29045 - DNA, 17 bp, synthetic construct
  source 1..17: mol_type = other DNA
ctctgcctaaaggggca

SEQ ID NO: 29046 - DNA, 17 bp, synthetic construct
  source 1..17: mol_type = other DNA
gctctgcctaaaggggc

SEQ ID NO: 29047 - DNA, 17 bp, synthetic construct
  source 1..17: mol_type = other DNA
agctctgcctaaagggg

SEQ ID NO: 29048 - DNA, 17 bp, synthetic construct
  source 1..17: mol_type = other DNA
aagctctgcctaaaggg

SEQ ID NO: 29049 - DNA, 17 bp, synthetic construct
  source 1..17: mol_type = other DNA
taagctctgcctaaagg

SEQ ID NO: 29050 - DNA, 17 bp, synthetic construct
  source 1..17: mol_type = other DNA
gtttaagctctgcctaa

SEQ ID NO: 29051 - DNA, 17 bp, synthetic construct
  source 1..17: mol_type = other DNA
tgatcacacaggtgatg

SEQ ID NO: 29052 - DNA, 17 bp, synthetic construct
  source 1..17: mol_type = other DNA
ctgatcacacaggtgat

SEQ ID NO: 29053 - DNA, 17 bp, synthetic construct
  source 1..17: mol_type = other DNA
actgatcacacaggtga

SEQ ID NO: 29054 - DNA, 17 bp, synthetic construct
  source 1..17: mol_type = other DNA
cactgatcacacaggtg

SEQ ID NO: 29055 - DNA, 17 bp, synthetic construct
  source 1..17: mol_type = other DNA
gactcttgtcttggatt

SEQ ID NO: 29056 - DNA, 17 bp, synthetic construct
  source 1..17: mol_type = other DNA
ctaagctctgcctaaag

SEQ ID NO: 29057 - DNA, 17 bp, synthetic construct
  source 1..17: mol_type = other DNA
tctaagctctgcctaaa

SEQ ID NO: 29058 - DNA, 17 bp, synthetic construct
  source 1..17: mol_type = other DNA
gtctaagctctgcctaa

SEQ ID NO: 29059 - DNA, 17 bp, synthetic construct
  source 1..17: mol_type = other DNA
agtctaagctctgccta

SEQ ID NO: 29060 - DNA, 17 bp, synthetic construct
  source 1..17: mol_type = other DNA
tagtctaagctctgcct

SEQ ID NO: 29061 - DNA, 17 bp, synthetic construct
  source 1..17: mol_type = other DNA
ctagtctaagctctgcc

SEQ ID NO: 29062 - DNA, 17 bp, synthetic construct
  source 1..17: mol_type = other DNA
tctagtctaagctctgc

SEQ ID NO: 29063 - DNA, 17 bp, synthetic construct
  source 1..17: mol_type = other DNA
ctctagtctaagctctg

SEQ ID NO: 29064 - DNA, 17 bp, synthetic construct
  source 1..17: mol_type = other DNA
actctagtctaagctct

SEQ ID NO: 29065 - DNA, 17 bp, synthetic construct
  source 1..17: mol_type = other DNA
aactctagtctaagctc

SEQ ID NO: 29066 - DNA, 17 bp, synthetic construct
  source 1..17: mol_type = other DNA
gtgatgtaactctagtc

SEQ ID NO: 29067 - DNA, 17 bp, synthetic construct
  source 1..17: mol_type = other DNA
atttgcctatgggggca

SEQ ID NO: 29068 - DNA, 17 bp, synthetic construct
  source 1..17: mol_type = other DNA
gatttgcctatgggggc

SEQ ID NO: 29069 - DNA, 17 bp, synthetic construct
  source 1..17: mol_type = other DNA
ggatttgcctatggggg

SEQ ID NO: 29070 - DNA, 17 bp, synthetic construct
  source 1..17: mol_type = other DNA
tggatttgcctatgggg

SEQ ID NO: 29071 - DNA, 17 bp, synthetic construct
  source 1..17: mol_type = other DNA
ttggatttgcctatggg

SEQ ID NO: 29072 - DNA, 17 bp, synthetic construct
  source 1..17: mol_type = other DNA
cttggatttgcctatgg

SEQ ID NO: 29073 - DNA, 17 bp, synthetic construct
  source 1..17: mol_type = other DNA
tcttggatttgcctatg

SEQ ID NO: 29074 - DNA, 17 bp, synthetic construct
  source 1..17: mol_type = other DNA
gtcttggatttgcctat

SEQ ID NO: 29075 - DNA, 17 bp, synthetic construct
  source 1..17: mol_type = other DNA
tgtcttggatttgccta

SEQ ID NO: 29076 - DNA, 17 bp, synthetic construct
  source 1..17: mol_type = other DNA
ttgtcttggatttgcct

SEQ ID NO: 29077 - DNA, 17 bp, synthetic construct
  source 1..17: mol_type = other DNA
cttgtcttggatttgcc

SEQ ID NO: 29078 - DNA, 17 bp, synthetic construct
  source 1..17: mol_type = other DNA
tcttgtcttggatttgc

SEQ ID NO: 29079 - DNA, 17 bp, synthetic construct
  source 1..17: mol_type = other DNA
ctcttgtcttggatttg

SEQ ID NO: 29080 - DNA, 17 bp, synthetic construct
  source 1..17: mol_type = other DNA
actcttgtcttggattt

SEQ ID NO: 29081 - DNA, 17 bp, synthetic construct
  source 1..17: mol_type = other DNA
agactcttgtcttggat

SEQ ID NO: 29082 - DNA, 17 bp, synthetic construct
  source 1..17: mol_type = other DNA
cagactcttgtcttgga

SEQ ID NO: 29083 - DNA, 17 bp, synthetic construct
  source 1..17: mol_type = other DNA
acagactcttgtcttgg

SEQ ID NO: 29084 - DNA, 17 bp, synthetic construct
  source 1..17: mol_type = other DNA
ggcattgtgacatattt

SEQ ID NO: 29085 - DNA, 17 bp, synthetic construct
  source 1..17: mol_type = other DNA
gggcattgtgacatatt

SEQ ID NO: 29086 - DNA, 17 bp, synthetic construct
  source 1..17: mol_type = other DNA
gttggatctgcctatgg

SEQ ID NO: 29087 - DNA, 17 bp, synthetic construct
  source 1..17: mol_type = other DNA
tgttggatctgcctatg

SEQ ID NO: 29088 - DNA, 17 bp, synthetic construct
  source 1..17: mol_type = other DNA
gtgttggatctgcctat

SEQ ID NO: 29089 - DNA, 17 bp, synthetic construct
  source 1..17: mol_type = other DNA
tgtgttggatctgccta

SEQ ID NO: 29090 - DNA, 17 bp, synthetic construct
  source 1..17: mol_type = other DNA
ttgtgttggatctgcct

SEQ ID NO: 29091 - DNA, 17 bp, synthetic construct
  source 1..17: mol_type = other DNA
cttgtgttggatctgcc

SEQ ID NO: 29092 - DNA, 17 bp, synthetic construct
  source 1..17: mol_type = other DNA
tcttgtgttggatctgc

SEQ ID NO: 29093 - DNA, 17 bp, synthetic construct
  source 1..17: mol_type = other DNA
ctcttgtgttggatctg

SEQ ID NO: 29094 - DNA, 17 bp, synthetic construct
  source 1..17: mol_type = other DNA
actcttgtgttggatct

SEQ ID NO: 29095 - DNA, 17 bp, synthetic construct
  source 1..17: mol_type = other DNA
aactcttgtgttggatc

SEQ ID NO: 29096 - DNA, 17 bp, synthetic construct
  source 1..17: mol_type = other DNA
gtaactcttgtgttgga

SEQ ID NO: 29097 - DNA, 17 bp, synthetic construct
  source 1..17: mol_type = other DNA
tgtaactcttgtgttgg

SEQ ID NO: 29098 - DNA, 17 bp, synthetic construct
  source 1..17: mol_type = other DNA
ttacatatctctgcact

SEQ ID NO: 29099 - DNA, 17 bp, synthetic construct
  source 1..17: mol_type = other DNA
gatcacacaggtgatgg

SEQ ID NO: 29100 - DNA, 17 bp, synthetic construct
  source 1..17: mol_type = other DNA
acactgatcacacaggt

SEQ ID NO: 29101 - DNA, 17 bp, synthetic construct
  source 1..17: mol_type = other DNA
tacactgatcacacagg

SEQ ID NO: 29102 - DNA, 17 bp, synthetic construct
  source 1..17: mol_type = other DNA
tctacactgatcacaca

SEQ ID NO: 29103 - DNA, 17 bp, synthetic construct
  source 1..17: mol_type = other DNA
ctctacactgatcacac

SEQ ID NO: 29104 - DNA, 17 bp, synthetic construct
  source 1..17: mol_type = other DNA
tctctacactgatcaca

SEQ ID NO: 29105 - DNA, 17 bp, synthetic construct
  source 1..17: mol_type = other DNA
aggcattgtgacatatc

SEQ ID NO: 29106 - DNA, 17 bp, synthetic construct
  source 1..17: mol_type = other DNA
gaggcattgtgacatat

SEQ ID NO: 29107 - DNA, 17 bp, synthetic construct
  source 1..17: mol_type = other DNA
ggaggcattgtgacata

SEQ ID NO: 29108 - DNA, 17 bp, synthetic construct
  source 1..17: mol_type = other DNA
aggaggcattgtgacat

SEQ ID NO: 29109 - DNA, 17 bp, synthetic construct
  source 1..17: mol_type = other DNA
caggaggcattgtgaca

SEQ ID NO: 29110 - DNA, 17 bp, synthetic construct
  source 1..17: mol_type = other DNA
acaggaggcattgtgac

SEQ ID NO: 29111 - DNA, 17 bp, synthetic construct
  source 1..17: mol_type = other DNA
tacaggaggcattgtga

SEQ ID NO: 29112 - DNA, 17 bp, synthetic construct
  source 1..17: mol_type = other DNA
ctacaggaggcattgtg

SEQ ID NO: 29113 - DNA, 17 bp, synthetic construct
  source 1..17: mol_type = other DNA
cctacaggaggcattgt

SEQ ID NO: 29114 - DNA, 17 bp, synthetic construct
  source 1..17: mol_type = other DNA
gcctacaggaggcattg

SEQ ID NO: 29115 - DNA, 17 bp, synthetic construct
  source 1..17: mol_type = other DNA
tgcctacaggaggcatt

SEQ ID NO: 29116 - DNA, 17 bp, synthetic construct
  source 1..17: mol_type = other DNA
ctgcctacaggaggcat

SEQ ID NO: 29117 - DNA, 17 bp, synthetic construct
  source 1..17: mol_type = other DNA
tctgcctacaggaggca

SEQ ID NO: 29118 - DNA, 17 bp, synthetic construct
  source 1..17: mol_type = other DNA
cctctgcctacaggagg

SEQ ID NO: 29119 - DNA, 17 bp, synthetic construct
  source 1..17: mol_type = other DNA
gcctctgcctacaggag

SEQ ID NO: 29120 - DNA, 17 bp, synthetic construct
  source 1..17: mol_type = other DNA
agcctctgcctacagga

SEQ ID NO: 29121 - DNA, 17 bp, synthetic construct
  source 1..17: mol_type = other DNA
tagcctctgcctacagg

SEQ ID NO: 29122 - DNA, 17 bp, synthetic construct
  source 1..17: mol_type = other DNA
ttagcctctgcctacag

SEQ ID NO: 29123 - DNA, 17 bp, synthetic construct
  source 1..17: mol_type = other DNA
tttagcctctgcctaca

SEQ ID NO: 29124 - DNA, 17 bp, synthetic construct
  source 1..17: mol_type = other DNA
gtttagcctctgcctac

SEQ ID NO: 29125 - DNA, 17 bp, synthetic construct
  source 1..17: mol_type = other DNA
tgtttagcctctgccta

SEQ ID NO: 29126 - DNA, 17 bp, synthetic construct
  source 1..17: mol_type = other DNA
ttgtttagcctctgcct

SEQ ID NO: 29127 - DNA, 17 bp, synthetic construct
  source 1..17: mol_type = other DNA
cttgtttagcctctgcc

SEQ ID NO: 29128 - DNA, 17 bp, synthetic construct
  source 1..17: mol_type = other DNA
tcttgtttagcctctgc

SEQ ID NO: 29129 - DNA, 17 bp, synthetic construct
  source 1..17: mol_type = other DNA
ctcttgtttagcctctg

SEQ ID NO: 29130 - DNA, 17 bp, synthetic construct
  source 1..17: mol_type = other DNA
actcttgtttagcctct

SEQ ID NO: 29131 - DNA, 17 bp, synthetic construct
  source 1..17: mol_type = other DNA
aactcttgtttagcctc

SEQ ID NO: 29132 - DNA, 17 bp, synthetic construct
  source 1..17: mol_type = other DNA
taactcttgtttagcct

SEQ ID NO: 29133 - DNA, 17 bp, synthetic construct
  source 1..17: mol_type = other DNA
gtaactcttgtttagcc

SEQ ID NO: 29134 - DNA, 17 bp, synthetic construct
  source 1..17: mol_type = other DNA
tccaggtgatgtaactc

SEQ ID NO: 29135 - DNA, 17 bp, synthetic construct
  source 1..17: mol_type = other DNA
atccaggtgatgtaact

SEQ ID NO: 29136 - DNA, 17 bp, synthetic construct
  source 1..17: mol_type = other DNA
tgtgacatattgcagga

SEQ ID NO: 29137 - DNA, 17 bp, synthetic construct
  source 1..17: mol_type = other DNA
ttgtgacatattgcagg

SEQ ID NO: 29138 - DNA, 17 bp, synthetic construct
  source 1..17: mol_type = other DNA
ccattgtgacatattgc

SEQ ID NO: 29139 - DNA, 17 bp, synthetic construct
  source 1..17: mol_type = other DNA
gccattgtgacatattg

SEQ ID NO: 29140 - DNA, 17 bp, synthetic construct
  source 1..17: mol_type = other DNA
cctaagcctaaccccta

SEQ ID NO: 29141 - DNA, 17 bp, synthetic construct
  source 1..17: mol_type = other DNA
gcctaagcctaacccct

SEQ ID NO: 29142 - DNA, 17 bp, synthetic construct
  source 1..17: mol_type = other DNA
agcctaagcctaacccc

SEQ ID NO: 29143 - DNA, 17 bp, synthetic construct
  source 1..17: mol_type = other DNA
aagcctaagcctaaccc

SEQ ID NO: 29144 - DNA, 17 bp, synthetic construct
  source 1..17: mol_type = other DNA
taagcctaagcctaacc

SEQ ID NO: 29145 - DNA, 17 bp, synthetic construct
  source 1..17: mol_type = other DNA
ctaagcctaagcctaac

SEQ ID NO: 29146 - DNA, 17 bp, synthetic construct
  source 1..17: mol_type = other DNA
cctaagcctaagcctaa

SEQ ID NO: 29147 - DNA, 17 bp, synthetic construct
  source 1..17: mol_type = other DNA
ccctaagcctaagccta

SEQ ID NO: 29148 - DNA, 17 bp, synthetic construct
  source 1..17: mol_type = other DNA
accctaagcctaagcct

SEQ ID NO: 29149 - DNA, 17 bp, synthetic construct
  source 1..17: mol_type = other DNA
aaccctaagcctaagcc

SEQ ID NO: 29150 - DNA, 17 bp, synthetic construct
  source 1..17: mol_type = other DNA
taaccctaagcctaagc

SEQ ID NO: 29151 - DNA, 17 bp, synthetic construct
  source 1..17: mol_type = other DNA
ctaaccctaagcctaag

SEQ ID NO: 29152 - DNA, 17 bp, synthetic construct
  source 1..17: mol_type = other DNA
cctaaccctaagcctaa

SEQ ID NO: 29153 - DNA, 17 bp, synthetic construct
  source 1..17: mol_type = other DNA
gcctaaccctaagccta

SEQ ID NO: 29154 - DNA, 17 bp, synthetic construct
  source 1..17: mol_type = other DNA
agcctaaccctaagcct

SEQ ID NO: 29155 - DNA, 17 bp, synthetic construct
  source 1..17: mol_type = other DNA
aagcctaaccctaagcc

SEQ ID NO: 29156 - DNA, 17 bp, synthetic construct
  source 1..17: mol_type = other DNA
taagcctaaccctaagc

SEQ ID NO: 29157 - DNA, 17 bp, synthetic construct
  source 1..17: mol_type = other DNA
ctaagcctaaccctaag

SEQ ID NO: 29158 - DNA, 17 bp, synthetic construct
  source 1..17: mol_type = other DNA
cctaagcctaaccctaa

SEQ ID NO: 29159 - DNA, 17 bp, synthetic construct
  source 1..17: mol_type = other DNA
gcctaagcctaacccta

SEQ ID NO: 29160 - DNA, 17 bp, synthetic construct
  source 1..17: mol_type = other DNA
agcctaagcctaaccct

SEQ ID NO: 29161 - DNA, 17 bp, synthetic construct
  source 1..17: mol_type = other DNA
taccctaagcctaagcc

SEQ ID NO: 29162 - DNA, 17 bp, synthetic construct
  source 1..17: mol_type = other DNA
ttaccctaagcctaagc

SEQ ID NO: 29163 - DNA, 17 bp, synthetic construct
  source 1..17: mol_type = other DNA
cttaccctaagcctaag

SEQ ID NO: 29164 - DNA, 17 bp, synthetic construct
  source 1..17: mol_type = other DNA
ccttaccctaagcctaa

SEQ ID NO: 29165 - DNA, 17 bp, synthetic construct
  source 1..17: mol_type = other DNA
gccttaccctaagccta

SEQ ID NO: 29166 - DNA, 17 bp, synthetic construct
  source 1..17: mol_type = other DNA
agccttaccctaagcct

SEQ ID NO: 29167 - DNA, 17 bp, synthetic construct
  source 1..17: mol_type = other DNA
aagccttaccctaagcc

SEQ ID NO: 29168 - DNA, 17 bp, synthetic construct
  source 1..17: mol_type = other DNA
taagccttaccctaagc

SEQ ID NO: 29169 - DNA, 17 bp, synthetic construct
  source 1..17: mol_type = other DNA
ctaagccttaccctaag

SEQ ID NO: 29170 - DNA, 17 bp, synthetic construct
  source 1..17: mol_type = other DNA
cctaagccttaccctaa

SEQ ID NO: 29171 - DNA, 17 bp, synthetic construct
  source 1..17: mol_type = other DNA
ccctaagccttacccta

SEQ ID NO: 29172 - DNA, 17 bp, synthetic construct
  source 1..17: mol_type = other DNA
accctaagccttaccct

SEQ ID NO: 29173 - DNA, 17 bp, synthetic construct
  source 1..17: mol_type = other DNA
aaccctaagccttaccc

SEQ ID NO: 29174 - DNA, 17 bp, synthetic construct
  source 1..17: mol_type = other DNA
gaaccctaagccttacc

SEQ ID NO: 29175 - DNA, 17 bp, synthetic construct
  source 1..17: mol_type = other DNA
tgaaccctaagccttac

SEQ ID NO: 29176 - DNA, 17 bp, synthetic construct
  source 1..17: mol_type = other DNA
ctgaaccctaagcctta

SEQ ID NO: 29177 - DNA, 17 bp, synthetic construct
  source 1..17: mol_type = other DNA
catgtcttaatagccta

SEQ ID NO: 29178 - DNA, 17 bp, synthetic construct
  source 1..17: mol_type = other DNA
acatgtcttaatagcct

SEQ ID NO: 29179 - DNA, 17 bp, synthetic construct
  source 1..17: mol_type = other DNA
gccattctttgaagaca

SEQ ID NO: 29180 - DNA, 17 bp, synthetic construct
  source 1..17: mol_type = other DNA
ggccattctttgaagac

SEQ ID NO: 29181 - DNA, 17 bp, synthetic construct
  source 1..17: mol_type = other DNA
aggccattctttgaaga

SEQ ID NO: 29182 - DNA, 17 bp, synthetic construct
  source 1..17: mol_type = other DNA
aaggccattctttgaag

SEQ ID NO: 29183 - DNA, 17 bp, synthetic construct
  source 1..17: mol_type = other DNA
caaggccattctttgaa

SEQ ID NO: 29184 - DNA, 17 bp, synthetic construct
  source 1..17: mol_type = other DNA
ccaaggccattctttga

SEQ ID NO: 29185 - DNA, 17 bp, synthetic construct
  source 1..17: mol_type = other DNA
accaaggccattctttg

SEQ ID NO: 29186 - DNA, 17 bp, synthetic construct
  source 1..17: mol_type = other DNA
aaccaaggccattcttt

SEQ ID NO: 29187 - DNA, 17 bp, synthetic construct
  source 1..17: mol_type = other DNA
aaaccaaggccattctt

SEQ ID NO: 29188 - DNA, 17 bp, synthetic construct
  source 1..17: mol_type = other DNA
gaaaccaaggccattct

SEQ ID NO: 29189 - DNA, 17 bp, synthetic construct
  source 1..17: mol_type = other DNA
agaaaccaaggccattc

SEQ ID NO: 29190 - DNA, 17 bp, synthetic construct
  source 1..17: mol_type = other DNA
cagaaaccaaggccatt

SEQ ID NO: 29191 - DNA, 17 bp, synthetic construct
  source 1..17: mol_type = other DNA
acagaaaccaaggccat

SEQ ID NO: 29192 - DNA, 17 bp, synthetic construct
  source 1..17: mol_type = other DNA
cacagaaaccaaggcca

SEQ ID NO: 29193 - DNA, 17 bp, synthetic construct
  source 1..17: mol_type = other DNA
ccacagaaaccaaggcc

SEQ ID NO: 29194 - DNA, 17 bp, synthetic construct
  source 1..17: mol_type = other DNA
tccacagaaaccaaggc

SEQ ID NO: 29195 - DNA, 17 bp, synthetic construct
  source 1..17: mol_type = other DNA
gtccacagaaaccaagg

SEQ ID NO: 29196 - DNA, 17 bp, synthetic construct
  source 1..17: mol_type = other DNA
ctgtccacagaaaccaa

SEQ ID NO: 29197 - DNA, 17 bp, synthetic construct
  source 1..17: mol_type = other DNA
actgtccacagaaacca

SEQ ID NO: 29198 - DNA, 17 bp, synthetic construct
  source 1..17: mol_type = other DNA
aactgtccacagaaacc

SEQ ID NO: 29199 - DNA, 17 bp, synthetic construct
  source 1..17: mol_type = other DNA
gagaaactgtccacaga

SEQ ID NO: 29200 - DNA, 17 bp, synthetic construct
  source 1..17: mol_type = other DNA
ggagaaactgtccacag

SEQ ID NO: 29201 - DNA, 17 bp, synthetic construct
  source 1..17: mol_type = other DNA
aggagaaactgtccaca

SEQ ID NO: 29202 - DNA, 17 bp, synthetic construct
  source 1..17: mol_type = other DNA
gaggagaaactgtccac

SEQ ID NO: 29203 - DNA, 17 bp, synthetic construct
  source 1..17: mol_type = other DNA
tgaggagaaactgtcca

SEQ ID NO: 29204 - DNA, 17 bp, synthetic construct
  source 1..17: mol_type = other DNA
atgaggagaaactgtcc

SEQ ID NO: 29205 - DNA, 17 bp, synthetic construct
  source 1..17: mol_type = other DNA
ccatgaggagaaactgt

SEQ ID NO: 29206 - DNA, 17 bp, synthetic construct
  source 1..17: mol_type = other DNA
cctttccatgaggagaa

SEQ ID NO: 29207 - DNA, 17 bp, synthetic construct
  source 1..17: mol_type = other DNA
acctttccatgaggaga

SEQ ID NO: 29208 - DNA, 17 bp, synthetic construct
  source 1..17: mol_type = other DNA
tacctttccatgaggag

SEQ ID NO: 29209 - DNA, 17 bp, synthetic construct
  source 1..17: mol_type = other DNA
ctacctttccatgagga

SEQ ID NO: 29210 - DNA, 17 bp, synthetic construct
  source 1..17: mol_type = other DNA
actacctttccatgagg

SEQ ID NO: 29211 - DNA, 17 bp, synthetic construct
  source 1..17: mol_type = other DNA
cactacctttccatgag

SEQ ID NO: 29212 - DNA, 17 bp, synthetic construct
  source 1..17: mol_type = other DNA
acactacctttccatga

SEQ ID NO: 29213 - DNA, 17 bp, synthetic construct
  source 1..17: mol_type = other DNA
cacactacctttccatg

SEQ ID NO: 29214 - DNA, 17 bp, synthetic construct
  source 1..17: mol_type = other DNA
acacactacctttccat

SEQ ID NO: 29215 - DNA, 17 bp, synthetic construct
  source 1..17: mol_type = other DNA
aacacactacctttcca

SEQ ID NO: 29216 - DNA, 17 bp, synthetic construct
  source 1..17: mol_type = other DNA
gaacacactacctttcc

SEQ ID NO: 29217 - DNA, 17 bp, synthetic construct
  source 1..17: mol_type = other DNA
ggaacacactacctttc

SEQ ID NO: 29218 - DNA, 17 bp, synthetic construct
  source 1..17: mol_type = other DNA
aggaacacactaccttt

SEQ ID NO: 29219 - DNA, 17 bp, synthetic construct
  source 1..17: mol_type = other DNA
caggaacacactacctt

SEQ ID NO: 29220 - DNA, 17 bp, synthetic construct
  source 1..17: mol_type = other DNA
gcaggaacacactacct

SEQ ID NO: 29221 - DNA, 17 bp, synthetic construct
  source 1..17: mol_type = other DNA
agcaggaacacactacc

SEQ ID NO: 29222 - DNA, 17 bp, synthetic construct
  source 1..17: mol_type = other DNA
attttgttgtgtgtgta

SEQ ID NO: 29223 - DNA, 17 bp, synthetic construct
  source 1..17: mol_type = other DNA
cctcagctaaattttgt

SEQ ID NO: 29224 - DNA, 17 bp, synthetic construct
  source 1..17: mol_type = other DNA
ccctcagctaaattttg

SEQ ID NO: 29225 - DNA, 17 bp, synthetic construct
  source 1..17: mol_type = other DNA
tccctcagctaaatttt

SEQ ID NO: 29226 - DNA, 17 bp, synthetic construct
  source 1..17: mol_type = other DNA
ctccctcagctaaattt

SEQ ID NO: 29227 - DNA, 17 bp, synthetic construct
  source 1..17: mol_type = other DNA
tctccctcagctaaatt

SEQ ID NO: 29228 - DNA, 17 bp, synthetic construct
  source 1..17: mol_type = other DNA
atctccctcagctaaat

SEQ ID NO: 29229 - DNA, 17 bp, synthetic construct
  source 1..17: mol_type = other DNA
aatctccctcagctaaa

SEQ ID NO: 29230 - DNA, 17 bp, synthetic construct
  source 1..17: mol_type = other DNA
caatctccctcagctaa

SEQ ID NO: 29231 - DNA, 17 bp, synthetic construct
  source 1..17: mol_type = other DNA
tcaatctccctcagcta

SEQ ID NO: 29232 - DNA, 17 bp, synthetic construct
  source 1..17: mol_type = other DNA
ctcaatctccctcagct

SEQ ID NO: 29233 - DNA, 17 bp, synthetic construct
  source 1..17: mol_type = other DNA
actcaatctccctcagc

SEQ ID NO: 29234 - DNA, 17 bp, synthetic construct
  source 1..17: mol_type = other DNA
cactcaatctccctcag

SEQ ID NO: 29235 - DNA, 17 bp, synthetic construct
  source 1..17: mol_type = other DNA
tcactcaatctccctca

SEQ ID NO: 29236 - DNA, 17 bp, synthetic construct
  source 1..17: mol_type = other DNA
gtcactcaatctccctc

SEQ ID NO: 29237 - DNA, 17 bp, synthetic construct
  source 1..17: mol_type = other DNA
agtcactcaatctccct

SEQ ID NO: 29238 - DNA, 17 bp, synthetic construct
  source 1..17: mol_type = other DNA
aagtcactcaatctccc

SEQ ID NO: 29239 - DNA, 17 bp, synthetic construct
  source 1..17: mol_type = other DNA
cctgggaaagtcactca

SEQ ID NO: 29240 - DNA, 17 bp, synthetic construct
  source 1..17: mol_type = other DNA
ccctgggaaagtcactc

SEQ ID NO: 29241 - DNA, 17 bp, synthetic construct
  source 1..17: mol_type = other DNA
accctgggaaagtcact

SEQ ID NO: 29242 - DNA, 17 bp, synthetic construct
  source 1..17: mol_type = other DNA
gaccctgggaaagtcac

SEQ ID NO: 29243 - DNA, 17 bp, synthetic construct
  source 1..17: mol_type = other DNA
tgaccctgggaaagtca

SEQ ID NO: 29244 - DNA, 17 bp, synthetic construct
  source 1..17: mol_type = other DNA
gtgaccctgggaaagtc

SEQ ID NO: 29245 - DNA, 17 bp, synthetic construct
  source 1..17: mol_type = other DNA
tgtgaccctgggaaagt

SEQ ID NO: 29246 - DNA, 17 bp, synthetic construct
  source 1..17: mol_type = other DNA
gtgtgaccctgggaaag

SEQ ID NO: 29247 - DNA, 17 bp, synthetic construct
  source 1..17: mol_type = other DNA
tgtgtgaccctgggaaa

SEQ ID NO: 29248 - DNA, 17 bp, synthetic construct
  source 1..17: mol_type = other DNA
ctgtgtgaccctgggaa

SEQ ID NO: 29249 - DNA, 17 bp, synthetic construct
  source 1..17: mol_type = other DNA
gctgtgtgaccctggga

SEQ ID NO: 29250 - DNA, 17 bp, synthetic construct
  source 1..17: mol_type = other DNA
agctgtgtgaccctggg

SEQ ID NO: 29251 - DNA, 17 bp, synthetic construct
  source 1..17: mol_type = other DNA
tagctgtgtgaccctgg

SEQ ID NO: 29252 - DNA, 17 bp, synthetic construct
  source 1..17: mol_type = other DNA
gtagctgtgtgaccctg

SEQ ID NO: 29253 - DNA, 17 bp, synthetic construct
  source 1..17: mol_type = other DNA
agtagctgtgtgaccct

SEQ ID NO: 29254 - DNA, 17 bp, synthetic construct
  source 1..17: mol_type = other DNA
tagtagctgtgtgaccc

SEQ ID NO: 29255 - DNA, 17 bp, synthetic construct
  source 1..17: mol_type = other DNA
ttagtagctgtgtgacc

SEQ ID NO: 29256 - DNA, 17 bp, synthetic construct
  source 1..17: mol_type = other DNA
attagtagctgtgtgac

SEQ ID NO: 29257 - DNA, 17 bp, synthetic construct
  source 1..17: mol_type = other DNA
tattagtagctgtgtga

SEQ ID NO: 29258 - DNA, 17 bp, synthetic construct
  source 1..17: mol_type = other DNA
ctattagtagctgtgtg

SEQ ID NO: 29259 - DNA, 17 bp, synthetic construct
  source 1..17: mol_type = other DNA
gctattagtagctgtgt

SEQ ID NO: 29260 - DNA, 17 bp, synthetic construct
  source 1..17: mol_type = other DNA
tgctattagtagctgtg

SEQ ID NO: 29261 - DNA, 17 bp, synthetic construct
  source 1..17: mol_type = other DNA
ctgctattagtagctgt

SEQ ID NO: 29262 - DNA, 17 bp, synthetic construct
  source 1..17: mol_type = other DNA
tctgctattagtagctg

SEQ ID NO: 29263 - DNA, 17 bp, synthetic construct
  source 1..17: mol_type = other DNA
ctctgctattagtagct

SEQ ID NO: 29264 - DNA, 17 bp, synthetic construct
  source 1..17: mol_type = other DNA
actctgctattagtagc

SEQ ID NO: 29265 - DNA, 17 bp, synthetic construct
  source 1..17: mol_type = other DNA
ctactctgctattagta

SEQ ID NO: 29266 - DNA, 17 bp, synthetic construct
  source 1..17: mol_type = other DNA
actactctgctattagt

SEQ ID NO: 29267 - DNA, 17 bp, synthetic construct
  source 1..17: mol_type = other DNA
cactactctgctattag

SEQ ID NO: 29268 - DNA, 17 bp, synthetic construct
  source 1..17: mol_type = other DNA
acactactctgctatta

SEQ ID NO: 29269 - DNA, 17 bp, synthetic construct
  source 1..17: mol_type = other DNA
tcagtattcccatatga

SEQ ID NO: 29270 - DNA, 17 bp, synthetic construct
  source 1..17: mol_type = other DNA
ttcagtattcccatatg

SEQ ID NO: 29271 - DNA, 17 bp, synthetic construct
  source 1..17: mol_type = other DNA
gttcagtattcccatat

SEQ ID NO: 29272 - DNA, 17 bp, synthetic construct
  source 1..17: mol_type = other DNA
tgttcagtattcccata

SEQ ID NO: 29273 - DNA, 17 bp, synthetic construct
  source 1..17: mol_type = other DNA
gtgttcagtattcccat

SEQ ID NO: 29274 - DNA, 17 bp, synthetic construct
  source 1..17: mol_type = other DNA
tgtgttcagtattccca

SEQ ID NO: 29275 - DNA, 17 bp, synthetic construct
  source 1..17: mol_type = other DNA
ctgtgttcagtattccc

SEQ ID NO: 29276 - DNA, 17 bp, synthetic construct
  source 1..17: mol_type = other DNA
tctgtgttcagtattcc

SEQ ID NO: 29277 - DNA, 17 bp, synthetic construct
  source 1..17: mol_type = other DNA
ttctgtgttcagtattc

SEQ ID NO: 29278 - DNA, 17 bp, synthetic construct
  source 1..17: mol_type = other DNA
tttctgtgttcagtatt

SEQ ID NO: 29279 - DNA, 17 bp, synthetic construct
  source 1..17: mol_type = other DNA
atttctgtgttcagtat

SEQ ID NO: 29280 - DNA, 17 bp, synthetic construct
  source 1..17: mol_type = other DNA
catttctgtgttcagta

SEQ ID NO: 29281 - DNA, 17 bp, synthetic construct
  source 1..17: mol_type = other DNA
tcatttctgtgttcagt

SEQ ID NO: 29282 - DNA, 17 bp, synthetic construct
  source 1..17: mol_type = other DNA
ttcatttctgtgttcag

SEQ ID NO: 29283 - DNA, 17 bp, synthetic construct
  source 1..17: mol_type = other DNA
gttcatttctgtgttca

SEQ ID NO: 29284 - DNA, 17 bp, synthetic construct
  source 1..17: mol_type = other DNA
ggttcatttctgtgttc

SEQ ID NO: 29285 - DNA, 17 bp, synthetic construct
  source 1..17: mol_type = other DNA
tggttcatttctgtgtt

SEQ ID NO: 29286 - DNA, 17 bp, synthetic construct
  source 1..17: mol_type = other DNA
ttggttcatttctgtgt

SEQ ID NO: 29287 - DNA, 17 bp, synthetic construct
  source 1..17: mol_type = other DNA
attggttcatttctgtg

SEQ ID NO: 29288 - DNA, 17 bp, synthetic construct
  source 1..17: mol_type = other DNA
cattggttcatttctgt

SEQ ID NO: 29289 - DNA, 17 bp, synthetic construct
  source 1..17: mol_type = other DNA
ccattggttcatttctg

SEQ ID NO: 29290 - DNA, 17 bp, synthetic construct
  source 1..17: mol_type = other DNA
tccattggttcatttct

SEQ ID NO: 29291 - DNA, 17 bp, synthetic construct
  source 1..17: mol_type = other DNA
ttccattggttcatttc

SEQ ID NO: 29292 - DNA, 17 bp, synthetic construct
  source 1..17: mol_type = other DNA
tttccattggttcattt

SEQ ID NO: 29293 - DNA, 17 bp, synthetic construct
  source 1..17: mol_type = other DNA
gtttccattggttcatt

SEQ ID NO: 29294 - DNA, 17 bp, synthetic construct
  source 1..17: mol_type = other DNA
tgtttccattggttcat

SEQ ID NO: 29295 - DNA, 17 bp, synthetic construct
  source 1..17: mol_type = other DNA
atgtttccattggttca

SEQ ID NO: 29296 - DNA, 17 bp, synthetic construct
  source 1..17: mol_type = other DNA
gatgtttccattggttc

SEQ ID NO: 29297 - DNA, 17 bp, synthetic construct
  source 1..17: mol_type = other DNA
ggatgtttccattggtt

SEQ ID NO: 29298 - DNA, 17 bp, synthetic construct
  source 1..17: mol_type = other DNA
aggatgtttccattggt

SEQ ID NO: 29299 - DNA, 17 bp, synthetic construct
  source 1..17: mol_type = other DNA
taggatgtttccattgg

SEQ ID NO: 29300 - DNA, 17 bp, synthetic construct
  source 1..17: mol_type = other DNA
gtaggatgtttccattg

SEQ ID NO: 29301 - DNA, 17 bp, synthetic construct
  source 1..17: mol_type = other DNA
cgtaggatgtttccatt

SEQ ID NO: 29302 - DNA, 17 bp, synthetic construct
  source 1..17: mol_type = other DNA
acgtaggatgtttccat

SEQ ID NO: 29303 - DNA, 17 bp, synthetic construct
  source 1..17: mol_type = other DNA
aacgtaggatgtttcca

SEQ ID NO: 29304 - DNA, 17 bp, synthetic construct
  source 1..17: mol_type = other DNA
gaacgtaggatgtttcc

SEQ ID NO: 29305 - DNA, 17 bp, synthetic construct
  source 1..17: mol_type = other DNA
ggaacgtaggatgtttc

SEQ ID NO: 29306 - DNA, 17 bp, synthetic construct
  source 1..17: mol_type = other DNA
gcttttggaacgtagga

SEQ ID NO: 29307 - DNA, 17 bp, synthetic construct
  source 1..17: mol_type = other DNA
ggcttttggaacgtagg

SEQ ID NO: 29308 - DNA, 17 bp, synthetic construct
  source 1..17: mol_type = other DNA
aggcttttggaacgtag

SEQ ID NO: 29309 - DNA, 17 bp, synthetic construct
  source 1..17: mol_type = other DNA
taggcttttggaacgta

SEQ ID NO: 29310 - DNA, 17 bp, synthetic construct
  source 1..17: mol_type = other DNA
gtaggcttttggaacgt

SEQ ID NO: 29311 - DNA, 17 bp, synthetic construct
  source 1..17: mol_type = other DNA
agtaggcttttggaacg

SEQ ID NO: 29312 - DNA, 17 bp, synthetic construct
  source 1..17: mol_type = other DNA
gagtaggcttttggaac

SEQ ID NO: 29313 - DNA, 17 bp, synthetic construct
  source 1..17: mol_type = other DNA
tgagtaggcttttggaa

SEQ ID NO: 29314 - DNA, 17 bp, synthetic construct
  source 1..17: mol_type = other DNA
ttgagtaggcttttgga

SEQ ID NO: 29315 - DNA, 17 bp, synthetic construct
  source 1..17: mol_type = other DNA
cttgagtaggcttttgg

SEQ ID NO: 29316 - DNA, 17 bp, synthetic construct
  source 1..17: mol_type = other DNA
gcttgagtaggcttttg

SEQ ID NO: 29317 - DNA, 17 bp, synthetic construct
  source 1..17: mol_type = other DNA
ggcttgagtaggctttt

SEQ ID NO: 29318 - DNA, 17 bp, synthetic construct
  source 1..17: mol_type = other DNA
tggcttgagtaggcttt

SEQ ID NO: 29319 - DNA, 17 bp, synthetic construct
  source 1..17: mol_type = other DNA
atggcttgagtaggctt

SEQ ID NO: 29320 - DNA, 17 bp, synthetic construct
  source 1..17: mol_type = other DNA
aatggcttgagtaggct

SEQ ID NO: 29321 - DNA, 17 bp, synthetic construct
  source 1..17: mol_type = other DNA
aaatggcttgagtaggc

SEQ ID NO: 29322 - DNA, 17 bp, synthetic construct
  source 1..17: mol_type = other DNA
ctgccattcataagtat

SEQ ID NO: 29323 - DNA, 17 bp, synthetic construct
  source 1..17: mol_type = other DNA
tctgccattcataagta

SEQ ID NO: 29324 - DNA, 17 bp, synthetic construct
  source 1..17: mol_type = other DNA
ctctgccattcataagt

SEQ ID NO: 29325 - DNA, 17 bp, synthetic construct
  source 1..17: mol_type = other DNA
tctctgccattcataag

SEQ ID NO: 29326 - DNA, 17 bp, synthetic construct
  source 1..17: mol_type = other DNA
atctctgccattcataa

SEQ ID NO: 29327 - DNA, 17 bp, synthetic construct
  source 1..17: mol_type = other DNA
gatctctgccattcata

SEQ ID NO: 29328 - DNA, 17 bp, synthetic construct
  source 1..17: mol_type = other DNA
agatctctgccattcat

SEQ ID NO: 29329 - DNA, 17 bp, synthetic construct
  source 1..17: mol_type = other DNA
tagatctctgccattca

SEQ ID NO: 29330 - DNA, 17 bp, synthetic construct
  source 1..17: mol_type = other DNA
gtagatctctgccattc

SEQ ID NO: 29331 - DNA, 17 bp, synthetic construct
  source 1..17: mol_type = other DNA
tgtagatctctgccatt

SEQ ID NO: 29332 - DNA, 17 bp, synthetic construct
  source 1..17: mol_type = other DNA
ctgtagatctctgccat

SEQ ID NO: 29333 - DNA, 17 bp, synthetic construct
  source 1..17: mol_type = other DNA
tctgtagatctctgcca

SEQ ID NO: 29334 - DNA, 17 bp, synthetic construct
  source 1..17: mol_type = other DNA
atctgtagatctctgcc

SEQ ID NO: 29335 - DNA, 17 bp, synthetic construct
  source 1..17: mol_type = other DNA
aatctgtagatctctgc

SEQ ID NO: 29336 - DNA, 17 bp, synthetic construct
  source 1..17: mol_type = other DNA
gcatcatttcttacatc

SEQ ID NO: 29337 - DNA, 17 bp, synthetic construct
  source 1..17: mol_type = other DNA
gagcatcatttcttaca

SEQ ID NO: 29338 - DNA, 17 bp, synthetic construct
  source 1..17: mol_type = other DNA
gtgagcatcatttctta

SEQ ID NO: 29339 - DNA, 17 bp, synthetic construct
  source 1..17: mol_type = other DNA
ggtgagcatcatttctt

SEQ ID NO: 29340 - DNA, 17 bp, synthetic construct
  source 1..17: mol_type = other DNA
tggtgagcatcatttct

SEQ ID NO: 29341 - DNA, 17 bp, synthetic construct
  source 1..17: mol_type = other DNA
ctggtgagcatcatttc

SEQ ID NO: 29342 - DNA, 17 bp, synthetic construct
  source 1..17: mol_type = other DNA
gctggtgagcatcattt

SEQ ID NO: 29343 - DNA, 17 bp, synthetic construct
  source 1..17: mol_type = other DNA
agctggtgagcatcatt

SEQ ID NO: 29344 - DNA, 17 bp, synthetic construct
  source 1..17: mol_type = other DNA
cagctggtgagcatcat

SEQ ID NO: 29345 - DNA, 17 bp, synthetic construct
  source 1..17: mol_type = other DNA
ccagctggtgagcatca

SEQ ID NO: 29346 - DNA, 17 bp, synthetic construct
  source 1..17: mol_type = other DNA
gtggggtggtagcagta

SEQ ID NO: 29347 - DNA, 17 bp, synthetic construct
  source 1..17: mol_type = other DNA
tgtggggtggtagcagt

SEQ ID NO: 29348 - DNA, 17 bp, synthetic construct
  source 1..17: mol_type = other DNA
ttgtggggtggtagcag

SEQ ID NO: 29349 - DNA, 17 bp, synthetic construct
  source 1..17: mol_type = other DNA
gttgtggggtggtagca

SEQ ID NO: 29350 - DNA, 17 bp, synthetic construct
  source 1..17: mol_type = other DNA
ggttgtggggtggtagc

SEQ ID NO: 29351 - DNA, 17 bp, synthetic construct
  source 1..17: mol_type = other DNA
gggttgtggggtggtag

SEQ ID NO: 29352 - DNA, 17 bp, synthetic construct
  source 1..17: mol_type = other DNA
catttgtccagtatgct

SEQ ID NO: 29353 - DNA, 17 bp, synthetic construct
  source 1..17: mol_type = other DNA
acatttgtccagtatgc

SEQ ID NO: 29354 - DNA, 17 bp, synthetic construct
  source 1..17: mol_type = other DNA
gacatttgtccagtatg

SEQ ID NO: 29355 - DNA, 17 bp, synthetic construct
  source 1..17: mol_type = other DNA
agacatttgtccagtat

SEQ ID NO: 29356 - DNA, 17 bp, synthetic construct
  source 1..17: mol_type = other DNA
tagacatttgtccagta

SEQ ID NO: 29357 - DNA, 17 bp, synthetic construct
  source 1..17: mol_type = other DNA
ttagacatttgtccagt

SEQ ID NO: 29358 - DNA, 17 bp, synthetic construct
  source 1..17: mol_type = other DNA
cttagacatttgtccag

SEQ ID NO: 29359 - DNA, 17 bp, synthetic construct
  source 1..17: mol_type = other DNA
gcttagacatttgtcca

SEQ ID NO: 29360 - DNA, 17 bp, synthetic construct
  source 1..17: mol_type = other DNA
ggcttagacatttgtcc

SEQ ID NO: 29361 - DNA, 17 bp, synthetic construct
  source 1..17: mol_type = other DNA
aggcttagacatttgtc

SEQ ID NO: 29362 - DNA, 17 bp, synthetic construct
  source 1..17: mol_type = other DNA
gaggcttagacatttgt

SEQ ID NO: 29363 - DNA, 17 bp, synthetic construct
  source 1..17: mol_type = other DNA
cgaggcttagacatttg

SEQ ID NO: 29364 - DNA, 17 bp, synthetic construct
  source 1..17: mol_type = other DNA
acgaggcttagacattt

SEQ ID NO: 29365 - DNA, 17 bp, synthetic construct
  source 1..17: mol_type = other DNA
cacgaggcttagacatt

SEQ ID NO: 29366 - DNA, 17 bp, synthetic construct
  source 1..17: mol_type = other DNA
ccacgaggcttagacat

SEQ ID NO: 29367 - DNA, 17 bp, synthetic construct
  source 1..17: mol_type = other DNA
accacgaggcttagaca

SEQ ID NO: 29368 - DNA, 17 bp, synthetic construct
  source 1..17: mol_type = other DNA
aaccacgaggcttagac

SEQ ID NO: 29369 - DNA, 17 bp, synthetic construct
  source 1..17: mol_type = other DNA
taaccacgaggcttaga

SEQ ID NO: 29370 - DNA, 17 bp, synthetic construct
  source 1..17: mol_type = other DNA
ctaaccacgaggcttag

SEQ ID NO: 29371 - DNA, 17 bp, synthetic construct
  source 1..17: mol_type = other DNA
actaaccacgaggctta

SEQ ID NO: 29372 - DNA, 17 bp, synthetic construct
  source 1..17: mol_type = other DNA
cactaaccacgaggctt

SEQ ID NO: 29373 - DNA, 17 bp, synthetic construct
  source 1..17: mol_type = other DNA
ccactaaccacgaggct

SEQ ID NO: 29374 - DNA, 17 bp, synthetic construct
  source 1..17: mol_type = other DNA
cccactaaccacgaggc

SEQ ID NO: 29375 - DNA, 17 bp, synthetic construct
  source 1..17: mol_type = other DNA
ccccactaaccacgagg

SEQ ID NO: 29376 - DNA, 17 bp, synthetic construct
  source 1..17: mol_type = other DNA
tccccactaaccacgag

SEQ ID NO: 29377 - DNA, 17 bp, synthetic construct
  source 1..17: mol_type = other DNA
gtccccactaaccacga

SEQ ID NO: 29378 - DNA, 17 bp, synthetic construct
  source 1..17: mol_type = other DNA
tgtccccactaaccacg

SEQ ID NO: 29379 - DNA, 17 bp, synthetic construct
  source 1..17: mol_type = other DNA
atgtccccactaaccac

SEQ ID NO: 29380 - DNA, 17 bp, synthetic construct
  source 1..17: mol_type = other DNA
aatgtccccactaacca

SEQ ID NO: 29381 - DNA, 17 bp, synthetic construct
  source 1..17: mol_type = other DNA
caatgtccccactaacc

SEQ ID NO: 29382 - DNA, 17 bp, synthetic construct
  source 1..17: mol_type = other DNA
gcaatgtccccactaac

SEQ ID NO: 29383 - DNA, 17 bp, synthetic construct
  source 1..17: mol_type = other DNA
agcaatgtccccactaa

SEQ ID NO: 29384 - DNA, 17 bp, synthetic construct
  source 1..17: mol_type = other DNA
cagcaatgtccccacta

SEQ ID NO: 29385 - DNA, 17 bp, synthetic construct
  source 1..17: mol_type = other DNA
ccagcaatgtccccact

SEQ ID NO: 29386 - DNA, 17 bp, synthetic construct
  source 1..17: mol_type = other DNA
accagcaatgtccccac

SEQ ID NO: 29387 - DNA, 17 bp, synthetic construct
  source 1..17: mol_type = other DNA
caccagcaatgtcccca

SEQ ID NO: 29388 - DNA, 17 bp, synthetic construct
  source 1..17: mol_type = other DNA
ccaccagcaatgtcccc

SEQ ID NO: 29389 - DNA, 17 bp, synthetic construct
  source 1..17: mol_type = other DNA
tccaccagcaatgtccc

SEQ ID NO: 29390 - DNA, 17 bp, synthetic construct
  source 1..17: mol_type = other DNA
ctccaccagcaatgtcc

SEQ ID NO: 29391 - DNA, 17 bp, synthetic construct
  source 1..17: mol_type = other DNA
actccaccagcaatgtc

SEQ ID NO: 29392 - DNA, 17 bp, synthetic construct
  source 1..17: mol_type = other DNA
gactccaccagcaatgt

SEQ ID NO: 29393 - DNA, 17 bp, synthetic construct
  source 1..17: mol_type = other DNA
agactccaccagcaatg

SEQ ID NO: 29394 - DNA, 17 bp, synthetic construct
  source 1..17: mol_type = other DNA
cagactccaccagcaat

SEQ ID NO: 29395 - DNA, 17 bp, synthetic construct
  source 1..17: mol_type = other DNA
tcagactccaccagcaa

SEQ ID NO: 29396 - DNA, 17 bp, synthetic construct
  source 1..17: mol_type = other DNA
ttcagactccaccagca

SEQ ID NO: 29397 - DNA, 17 bp, synthetic construct
  source 1..17: mol_type = other DNA
tttcagactccaccagc

SEQ ID NO: 29398 - DNA, 17 bp, synthetic construct
  source 1..17: mol_type = other DNA
atttcagactccaccag

SEQ ID NO: 29399 - DNA, 17 bp, synthetic construct
  source 1..17: mol_type = other DNA
aatttcagactccacca

SEQ ID NO: 29400 - DNA, 17 bp, synthetic construct
  source 1..17: mol_type = other DNA
caatttcagactccacc

SEQ ID NO: 29401 - DNA, 17 bp, synthetic construct
  source 1..17: mol_type = other DNA
acaatttcagactccac

SEQ ID NO: 29402 - DNA, 17 bp, synthetic construct
  source 1..17: mol_type = other DNA
gacaatttcagactcca

SEQ ID NO: 29403 - DNA, 17 bp, synthetic construct
  source 1..17: mol_type = other DNA
gtcactgcatgacaatt

SEQ ID NO: 29404 - DNA, 17 bp, synthetic construct
  source 1..17: mol_type = other DNA
agtcactgcatgacaat

SEQ ID NO: 29405 - DNA, 17 bp, synthetic construct
  source 1..17: mol_type = other DNA
gagtcactgcatgacaa

SEQ ID NO: 29406 - DNA, 17 bp, synthetic construct
  source 1..17: mol_type = other DNA
tgagtcactgcatgaca

SEQ ID NO: 29407 - DNA, 17 bp, synthetic construct
  source 1..17: mol_type = other DNA
gtgagtcactgcatgac

SEQ ID NO: 29408 - DNA, 17 bp, synthetic construct
  source 1..17: mol_type = other DNA
agtgagtcactgcatga

SEQ ID NO: 29409 - DNA, 17 bp, synthetic construct
  source 1..17: mol_type = other DNA
gagtgagtcactgcatg

SEQ ID NO: 29410 - DNA, 17 bp, synthetic construct
  source 1..17: mol_type = other DNA
tgagtgagtcactgcat

SEQ ID NO: 29411 - DNA, 17 bp, synthetic construct
  source 1..17: mol_type = other DNA
ttgagtgagtcactgca

SEQ ID NO: 29412 - DNA, 17 bp, synthetic construct
  source 1..17: mol_type = other DNA
cttgagtgagtcactgc

SEQ ID NO: 29413 - DNA, 17 bp, synthetic construct
  source 1..17: mol_type = other DNA
gcttgagtgagtcactg

SEQ ID NO: 29414 - DNA, 17 bp, synthetic construct
  source 1..17: mol_type = other DNA
agcttgagtgagtcact

SEQ ID NO: 29415 - DNA, 17 bp, synthetic construct
  source 1..17: mol_type = other DNA
aagcttgagtgagtcac

SEQ ID NO: 29416 - DNA, 17 bp, synthetic construct
  source 1..17: mol_type = other DNA
taagcttgagtgagtca

SEQ ID NO: 29417 - DNA, 17 bp, synthetic construct
  source 1..17: mol_type = other DNA
ctaagcttgagtgagtc

SEQ ID NO: 29418 - DNA, 17 bp, synthetic construct
  source 1..17: mol_type = other DNA
cctaagcttgagtgagt

SEQ ID NO: 29419 - DNA, 17 bp, synthetic construct
  source 1..17: mol_type = other DNA
gcctaagcttgagtgag

SEQ ID NO: 29420 - DNA, 17 bp, synthetic construct
  source 1..17: mol_type = other DNA
tgcctaagcttgagtga

SEQ ID NO: 29421 - DNA, 17 bp, synthetic construct
  source 1..17: mol_type = other DNA
ctgcctaagcttgagtg

SEQ ID NO: 29422 - DNA, 17 bp, synthetic construct
  source 1..17: mol_type = other DNA
tctgcctaagcttgagt

SEQ ID NO: 29423 - DNA, 17 bp, synthetic construct
  source 1..17: mol_type = other DNA
atctgcctaagcttgag

SEQ ID NO: 29424 - DNA, 17 bp, synthetic construct
  source 1..17: mol_type = other DNA
aatctgcctaagcttga

SEQ ID NO: 29425 - DNA, 17 bp, synthetic construct
  source 1..17: mol_type = other DNA
caaatctgcctaagctt

SEQ ID NO: 29426 - DNA, 17 bp, synthetic construct
  source 1..17: mol_type = other DNA
ccaaatctgcctaagct

SEQ ID NO: 29427 - DNA, 17 bp, synthetic construct
  source 1..17: mol_type = other DNA
accaaatctgcctaagc

SEQ ID NO: 29428 - DNA, 17 bp, synthetic construct
  source 1..17: mol_type = other DNA
caccaaatctgcctaag

SEQ ID NO: 29429 - DNA, 17 bp, synthetic construct
  source 1..17: mol_type = other DNA
tcaccaaatctgcctaa

SEQ ID NO: 29430 - DNA, 17 bp, synthetic construct
  source 1..17: mol_type = other DNA
atcaccaaatctgccta

SEQ ID NO: 29431 - DNA, 17 bp, synthetic construct
  source 1..17: mol_type = other DNA
tatcaccaaatctgcct

SEQ ID NO: 29432 - DNA, 17 bp, synthetic construct
  source 1..17: mol_type = other DNA
atatcaccaaatctgcc

SEQ ID NO: 29433 - DNA, 17 bp, synthetic construct
  source 1..17: mol_type = other DNA
tgtgtcatatatcacca

SEQ ID NO: 29434 - DNA, 17 bp, synthetic construct
  source 1..17: mol_type = other DNA
ctgtgtcatatatcacc

SEQ ID NO: 29435 - DNA, 17 bp, synthetic construct
  source 1..17: mol_type = other DNA
ctctgtgtcatatatca

SEQ ID NO: 29436 - DNA, 17 bp, synthetic construct
  source 1..17: mol_type = other DNA
tctctgtgtcatatatc

SEQ ID NO: 29437 - DNA, 17 bp, synthetic construct
  source 1..17: mol_type = other DNA
catctctgtgtcatata

SEQ ID NO: 29438 - DNA, 17 bp, synthetic construct
  source 1..17: mol_type = other DNA
gcatctctgtgtcatat

SEQ ID NO: 29439 - DNA, 17 bp, synthetic construct
  source 1..17: mol_type = other DNA
tgcatctctgtgtcata

SEQ ID NO: 29440 - DNA, 17 bp, synthetic construct
  source 1..17: mol_type = other DNA
ttgcatctctgtgtcat

SEQ ID NO: 29441 - DNA, 17 bp, synthetic construct
  source 1..17: mol_type = other DNA
tttgcatctctgtgtca

SEQ ID NO: 29442 - DNA, 17 bp, synthetic construct
  source 1..17: mol_type = other DNA
ctttgcatctctgtgtc

SEQ ID NO: 29443 - DNA, 17 bp, synthetic construct
  source 1..17: mol_type = other DNA
tctttgcatctctgtgt

SEQ ID NO: 29444 - DNA, 17 bp, synthetic construct
  source 1..17: mol_type = other DNA
ttctttgcatctctgtg

SEQ ID NO: 29445 - DNA, 17 bp, synthetic construct
  source 1..17: mol_type = other DNA
tttctttgcatctctgt

SEQ ID NO: 29446 - DNA, 17 bp, synthetic construct
  source 1..17: mol_type = other DNA
atttctttgcatctctg

SEQ ID NO: 29447 - DNA, 17 bp, synthetic construct
  source 1..17: mol_type = other DNA
catttctttgcatctct

SEQ ID NO: 29448 - DNA, 17 bp, synthetic construct
  source 1..17: mol_type = other DNA
acatttctttgcatctc

SEQ ID NO: 29449 - DNA, 17 bp, synthetic construct
  source 1..17: mol_type = other DNA
gtcagctacaacatttc

SEQ ID NO: 29450 - DNA, 17 bp, synthetic construct
  source 1..17: mol_type = other DNA
gtgtcagctacaacatt

SEQ ID NO: 29451 - DNA, 17 bp, synthetic construct
  source 1..17: mol_type = other DNA
tgtgtcagctacaacat

SEQ ID NO: 29452 - DNA, 17 bp, synthetic construct
  source 1..17: mol_type = other DNA
gtgtgtcagctacaaca

SEQ ID NO: 29453 - DNA, 17 bp, synthetic construct
  source 1..17: mol_type = other DNA
tgtgtgtcagctacaac

SEQ ID NO: 29454 - DNA, 17 bp, synthetic construct
  source 1..17: mol_type = other DNA
gtgtgtgtcagctacaa

SEQ ID NO: 29455 - DNA, 17 bp, synthetic construct
  source 1..17: mol_type = other DNA
tgtgtgtgtcagctaca

SEQ ID NO: 29456 - DNA, 17 bp, synthetic construct
  source 1..17: mol_type = other DNA
ctgtgtgtgtcagctac

SEQ ID NO: 29457 - DNA, 17 bp, synthetic construct
  source 1..17: mol_type = other DNA
cctgtgtgtgtcagcta

SEQ ID NO: 29458 - DNA, 17 bp, synthetic construct
  source 1..17: mol_type = other DNA
agcctgtgtgtgtcagc

SEQ ID NO: 29459 - DNA, 17 bp, synthetic construct
  source 1..17: mol_type = other DNA
cagcctgtgtgtgtcag

SEQ ID NO: 29460 - DNA, 17 bp, synthetic construct
  source 1..17: mol_type = other DNA
ccagcctgtgtgtgtca

SEQ ID NO: 29461 - DNA, 17 bp, synthetic construct
  source 1..17: mol_type = other DNA
gagccagcctgtgtgtg

SEQ ID NO: 29462 - DNA, 17 bp, synthetic construct
  source 1..17: mol_type = other DNA
agagccagcctgtgtgt

SEQ ID NO: 29463 - DNA, 17 bp, synthetic construct
  source 1..17: mol_type = other DNA
cagagccagcctgtgtg

SEQ ID NO: 29464 - DNA, 17 bp, synthetic construct
  source 1..17: mol_type = other DNA
catctcccagagccagc

SEQ ID NO: 29465 - DNA, 17 bp, synthetic construct
  source 1..17: mol_type = other DNA
gcatctcccagagccag

SEQ ID NO: 29466 - DNA, 17 bp, synthetic construct
  source 1..17: mol_type = other DNA
tgcatctcccagagcca

SEQ ID NO: 29467 - DNA, 17 bp, synthetic construct
  source 1..17: mol_type = other DNA
ctgcatctcccagagcc

SEQ ID NO: 29468 - DNA, 17 bp, synthetic construct
  source 1..17: mol_type = other DNA
tctgcatctcccagagc

SEQ ID NO: 29469 - DNA, 17 bp, synthetic construct
  source 1..17: mol_type = other DNA
ttctgcatctcccagag

SEQ ID NO: 29470 - DNA, 17 bp, synthetic construct
  source 1..17: mol_type = other DNA
cttctgcatctcccaga

SEQ ID NO: 29471 - DNA, 17 bp, synthetic construct
  source 1..17: mol_type = other DNA
ccttctgcatctcccag

SEQ ID NO: 29472 - DNA, 17 bp, synthetic construct
  source 1..17: mol_type = other DNA
tccttctgcatctccca

SEQ ID NO: 29473 - DNA, 17 bp, synthetic construct
  source 1..17: mol_type = other DNA
ctccttctgcatctccc

SEQ ID NO: 29474 - DNA, 17 bp, synthetic construct
  source 1..17: mol_type = other DNA
tgctccttctgcatctc

SEQ ID NO: 29475 - DNA, 17 bp, synthetic construct
  source 1..17: mol_type = other DNA
gtgctccttctgcatct

SEQ ID NO: 29476 - DNA, 17 bp, synthetic construct
  source 1..17: mol_type = other DNA
cgtgctccttctgcatc

SEQ ID NO: 29477 - DNA, 17 bp, synthetic construct
  source 1..17: mol_type = other DNA
acgtgctccttctgcat

SEQ ID NO: 29478 - DNA, 17 bp, synthetic construct
  source 1..17: mol_type = other DNA
gacgtgctccttctgca

SEQ ID NO: 29479 - DNA, 17 bp, synthetic construct
  source 1..17: mol_type = other DNA
ggacgtgctccttctgc

SEQ ID NO: 29480 - DNA, 17 bp, synthetic construct
  source 1..17: mol_type = other DNA
gggacgtgctccttctg

SEQ ID NO: 29481 - DNA, 17 bp, synthetic construct
  source 1..17: mol_type = other DNA
ggggacgtgctccttct

SEQ ID NO: 29482 - DNA, 17 bp, synthetic construct
  source 1..17: mol_type = other DNA
tgggggacgtgctcctt

SEQ ID NO: 29483 - DNA, 17 bp, synthetic construct
  source 1..17: mol_type = other DNA
ttgggggacgtgctcct

SEQ ID NO: 29484 - DNA, 17 bp, synthetic construct
  source 1..17: mol_type = other DNA
tttgggggacgtgctcc

SEQ ID NO: 29485 - DNA, 17 bp, synthetic construct
  source 1..17: mol_type = other DNA
ttttgggggacgtgctc

SEQ ID NO: 29486 - DNA, 17 bp, synthetic construct
  source 1..17: mol_type = other DNA
attttgggggacgtgct

SEQ ID NO: 29487 - DNA, 17 bp, synthetic construct
  source 1..17: mol_type = other DNA
cattttgggggacgtgc

SEQ ID NO: 29488 - DNA, 17 bp, synthetic construct
  source 1..17: mol_type = other DNA
tcattttgggggacgtg

SEQ ID NO: 29489 - DNA, 17 bp, synthetic construct
  source 1..17: mol_type = other DNA
ttcattttgggggacgt

SEQ ID NO: 29490 - DNA, 17 bp, synthetic construct
  source 1..17: mol_type = other DNA
cttcattttgggggacg

SEQ ID NO: 29491 - DNA, 17 bp, synthetic construct
  source 1..17: mol_type = other DNA
gcttcattttgggggac

SEQ ID NO: 29492 - DNA, 17 bp, synthetic construct
  source 1..17: mol_type = other DNA
ggcttcattttggggga

SEQ ID NO: 29493 - DNA, 17 bp, synthetic construct
  source 1..17: mol_type = other DNA
tggcttcattttggggg

SEQ ID NO: 29494 - DNA, 17 bp, synthetic construct
  source 1..17: mol_type = other DNA
ctggcttcattttgggg

SEQ ID NO: 29495 - DNA, 17 bp, synthetic construct
  source 1..17: mol_type = other DNA
tctggcttcattttggg

SEQ ID NO: 29496 - DNA, 17 bp, synthetic construct
  source 1..17: mol_type = other DNA
gtctggcttcattttgg

SEQ ID NO: 29497 - DNA, 17 bp, synthetic construct
  source 1..17: mol_type = other DNA
tgtctggcttcattttg

SEQ ID NO: 29498 - DNA, 17 bp, synthetic construct
  source 1..17: mol_type = other DNA
ctgtctggcttcatttt

SEQ ID NO: 29499 - DNA, 17 bp, synthetic construct
  source 1..17: mol_type = other DNA
tctgtctggcttcattt

SEQ ID NO: 29500 - DNA, 17 bp, synthetic construct
  source 1..17: mol_type = other DNA
gtctgtctggcttcatt

SEQ ID NO: 29501 - DNA, 17 bp, synthetic construct
  source 1..17: mol_type = other DNA
tgtctgtctggcttcat

SEQ ID NO: 29502 - DNA, 17 bp, synthetic construct
  source 1..17: mol_type = other DNA
atgtctgtctggcttca

SEQ ID NO: 29503 - DNA, 17 bp, synthetic construct
  source 1..17: mol_type = other DNA
gatgtctgtctggcttc

SEQ ID NO: 29504 - DNA, 17 bp, synthetic construct
  source 1..17: mol_type = other DNA
ggatgtctgtctggctt

SEQ ID NO: 29505 - DNA, 17 bp, synthetic construct
  source 1..17: mol_type = other DNA
aggatgtctgtctggct

SEQ ID NO: 29506 - DNA, 17 bp, synthetic construct
  source 1..17: mol_type = other DNA
aaggatgtctgtctggc

SEQ ID NO: 29507 - DNA, 17 bp, synthetic construct
  source 1..17: mol_type = other DNA
taaggatgtctgtctgg

SEQ ID NO: 29508 - DNA, 17 bp, synthetic construct
  source 1..17: mol_type = other DNA
ttaaggatgtctgtctg

SEQ ID NO: 29509 - DNA, 17 bp, synthetic construct
  source 1..17: mol_type = other DNA
cttaaggatgtctgtct

SEQ ID NO: 29510 - DNA, 17 bp, synthetic construct
  source 1..17: mol_type = other DNA
ccttaaggatgtctgtc

SEQ ID NO: 29511 - DNA, 17 bp, synthetic construct
  source 1..17: mol_type = other DNA
tccttaaggatgtctgt

SEQ ID NO: 29512 - DNA, 17 bp, synthetic construct
  source 1..17: mol_type = other DNA
ttccttaaggatgtctg

SEQ ID NO: 29513 - DNA, 17 bp, synthetic construct
  source 1..17: mol_type = other DNA
cttccttaaggatgtct

SEQ ID NO: 29514 - DNA, 17 bp, synthetic construct
  source 1..17: mol_type = other DNA
ccttccttaaggatgtc

SEQ ID NO: 29515 - DNA, 17 bp, synthetic construct
  source 1..17: mol_type = other DNA
tccttccttaaggatgt

SEQ ID NO: 29516 - DNA, 17 bp, synthetic construct
  source 1..17: mol_type = other DNA
ctccttccttaaggatg

SEQ ID NO: 29517 - DNA, 17 bp, synthetic construct
  source 1..17: mol_type = other DNA
gctccttccttaaggat

SEQ ID NO: 29518 - DNA, 17 bp, synthetic construct
  source 1..17: mol_type = other DNA
tgctccttccttaagga

SEQ ID NO: 29519 - DNA, 17 bp, synthetic construct
  source 1..17: mol_type = other DNA
ttgctccttccttaagg

SEQ ID NO: 29520 - DNA, 17 bp, synthetic construct
  source 1..17: mol_type = other DNA
tttgctccttccttaag

SEQ ID NO: 29521 - DNA, 17 bp, synthetic construct
  source 1..17: mol_type = other DNA
ctttgctccttccttaa

SEQ ID NO: 29522 - DNA, 17 bp, synthetic construct
  source 1..17: mol_type = other DNA
cctttgctccttcctta

SEQ ID NO: 29523 - DNA, 17 bp, synthetic construct
  source 1..17: mol_type = other DNA
aagcccctttgctcctt

SEQ ID NO: 29524 - DNA, 17 bp, synthetic construct
  source 1..17: mol_type = other DNA
gaagcccctttgctcct

SEQ ID NO: 29525 - DNA, 17 bp, synthetic construct
  source 1..17: mol_type = other DNA
tgaagcccctttgctcc

SEQ ID NO: 29526 - DNA, 17 bp, synthetic construct
  source 1..17: mol_type = other DNA
atgaagcccctttgctc

SEQ ID NO: 29527 - DNA, 17 bp, synthetic construct
  source 1..17: mol_type = other DNA
gatgaagcccctttgct

SEQ ID NO: 29528 - DNA, 17 bp, synthetic construct
  source 1..17: mol_type = other DNA
agatgaagcccctttgc

SEQ ID NO: 29529 - DNA, 17 bp, synthetic construct
  source 1..17: mol_type = other DNA
aagatgaagcccctttg

SEQ ID NO: 29530 - DNA, 17 bp, synthetic construct
  source 1..17: mol_type = other DNA
taagatgaagccccttt

SEQ ID NO: 29531 - DNA, 17 bp, synthetic construct
  source 1..17: mol_type = other DNA
ttaagatgaagcccctt

SEQ ID NO: 29532 - DNA, 17 bp, synthetic construct
  source 1..17: mol_type = other DNA
tttaagatgaagcccct

SEQ ID NO: 29533 - DNA, 17 bp, synthetic construct
  source 1..17: mol_type = other DNA
ctttaagatgaagcccc

SEQ ID NO: 29534 - DNA, 17 bp, synthetic construct
  source 1..17: mol_type = other DNA
tctttaagatgaagccc

SEQ ID NO: 29535 - DNA, 17 bp, synthetic construct
  source 1..17: mol_type = other DNA
ccttcttcattctttaa

SEQ ID NO: 29536 - DNA, 17 bp, synthetic construct
  source 1..17: mol_type = other DNA
cccttcttcattcttta

SEQ ID NO: 29537 - DNA, 17 bp, synthetic construct
  source 1..17: mol_type = other DNA
tcccttcttcattcttt

SEQ ID NO: 29538 - DNA, 17 bp, synthetic construct
  source 1..17: mol_type = other DNA
atcccttcttcattctt

SEQ ID NO: 29539 - DNA, 17 bp, synthetic construct
  source 1..17: mol_type = other DNA
aatcccttcttcattct

SEQ ID NO: 29540 - DNA, 17 bp, synthetic construct
  source 1..17: mol_type = other DNA
aaatcccttcttcattc

SEQ ID NO: 29541 - DNA, 17 bp, synthetic construct
  source 1..17: mol_type = other DNA
caaatcccttcttcatt

SEQ ID NO: 29542 - DNA, 17 bp, synthetic construct
  source 1..17: mol_type = other DNA
acaaatcccttcttcat

SEQ ID NO: 29543 - DNA, 17 bp, synthetic construct
  source 1..17: mol_type = other DNA
gacaaatcccttcttca

SEQ ID NO: 29544 - DNA, 17 bp, synthetic construct
  source 1..17: mol_type = other DNA
tgacaaatcccttcttc

SEQ ID NO: 29545 - DNA, 17 bp, synthetic construct
  source 1..17: mol_type = other DNA
atgacaaatcccttctt

SEQ ID NO: 29546 - DNA, 17 bp, synthetic construct
  source 1..17: mol_type = other DNA
catgacaaatcccttct

SEQ ID NO: 29547 - DNA, 17 bp, synthetic construct
  source 1..17: mol_type = other DNA
tcatgacaaatcccttc

SEQ ID NO: 29548 - DNA, 17 bp, synthetic construct
  source 1..17: mol_type = other DNA
ctcatgacaaatccctt

SEQ ID NO: 29549 - DNA, 17 bp, synthetic construct
  source 1..17: mol_type = other DNA
tctcatgacaaatccct

SEQ ID NO: 29550 - DNA, 17 bp, synthetic construct
  source 1..17: mol_type = other DNA
ctctcatgacaaatccc

SEQ ID NO: 29551 - DNA, 17 bp, synthetic construct
  source 1..17: mol_type = other DNA
ccacatctctcatgaca

SEQ ID NO: 29552 - DNA, 17 bp, synthetic construct
  source 1..17: mol_type = other DNA
gccacatctctcatgac

SEQ ID NO: 29553 - DNA, 17 bp, synthetic construct
  source 1..17: mol_type = other DNA
tgccacatctctcatga

SEQ ID NO: 29554 - DNA, 17 bp, synthetic construct
  source 1..17: mol_type = other DNA
ctgccacatctctcatg

SEQ ID NO: 29555 - DNA, 17 bp, synthetic construct
  source 1..17: mol_type = other DNA
cctgccacatctctcat

SEQ ID NO: 29556 - DNA, 17 bp, synthetic construct
  source 1..17: mol_type = other DNA
tcctgccacatctctca

SEQ ID NO: 29557 - DNA, 17 bp, synthetic construct
  source 1..17: mol_type = other DNA
ttcctgccacatctctc

SEQ ID NO: 29558 - DNA, 17 bp, synthetic construct
  source 1..17: mol_type = other DNA
attcctgccacatctct

SEQ ID NO: 29559 - DNA, 17 bp, synthetic construct
  source 1..17: mol_type = other DNA
aattcctgccacatctc

SEQ ID NO: 29560 - DNA, 17 bp, synthetic construct
  source 1..17: mol_type = other DNA
aaattcctgccacatct

SEQ ID NO: 29561 - DNA, 17 bp, synthetic construct
  source 1..17: mol_type = other DNA
gaaattcctgccacatc

SEQ ID NO: 29562 - DNA, 17 bp, synthetic construct
  source 1..17: mol_type = other DNA
agaaattcctgccacat

SEQ ID NO: 29563 - DNA, 17 bp, synthetic construct
  source 1..17: mol_type = other DNA
aagaaattcctgccaca

SEQ ID NO: 29564 - DNA, 17 bp, synthetic construct
  source 1..17: mol_type = other DNA
caagaaattcctgccac

SEQ ID NO: 29565 - DNA, 17 bp, synthetic construct
  source 1..17: mol_type = other DNA
tcaagaaattcctgcca

SEQ ID NO: 29566 - DNA, 17 bp, synthetic construct
  source 1..17: mol_type = other DNA
ctcaagaaattcctgcc

SEQ ID NO: 29567 - DNA, 17 bp, synthetic construct
  source 1..17: mol_type = other DNA
cctctcaagaaattcct

SEQ ID NO: 29568 - DNA, 17 bp, synthetic construct
  source 1..17: mol_type = other DNA
gcctctcaagaaattcc

SEQ ID NO: 29569 - DNA, 17 bp, synthetic construct
  source 1..17: mol_type = other DNA
ctgcctctcaagaaatt

SEQ ID NO: 29570 - DNA, 17 bp, synthetic construct
  source 1..17: mol_type = other DNA
tctgcctctcaagaaat

SEQ ID NO: 29571 - DNA, 17 bp, synthetic construct
  source 1..17: mol_type = other DNA
ctctgcctctcaagaaa

SEQ ID NO: 29572 - DNA, 17 bp, synthetic construct
  source 1..17: mol_type = other DNA
cctctgcctctcaagaa

SEQ ID NO: 29573 - DNA, 17 bp, synthetic construct
  source 1..17: mol_type = other DNA
ccctctgcctctcaaga

SEQ ID NO: 29574 - DNA, 17 bp, synthetic construct
  source 1..17: mol_type = other DNA
tccctctgcctctcaag

SEQ ID NO: 29575 - DNA, 17 bp, synthetic construct
  source 1..17: mol_type = other DNA
ctccctctgcctctcaa

SEQ ID NO: 29576 - DNA, 17 bp, synthetic construct
  source 1..17: mol_type = other DNA
tcatgctctccctctgc

SEQ ID NO: 29577 - DNA, 17 bp, synthetic construct
  source 1..17: mol_type = other DNA
ctcatgctctccctctg

SEQ ID NO: 29578 - DNA, 17 bp, synthetic construct
  source 1..17: mol_type = other DNA
tctcatgctctccctct

SEQ ID NO: 29579 - DNA, 17 bp, synthetic construct
  source 1..17: mol_type = other DNA
ttctcatgctctccctc

SEQ ID NO: 29580 - DNA, 17 bp, synthetic construct
  source 1..17: mol_type = other DNA
attctcatgctctccct

SEQ ID NO: 29581 - DNA, 17 bp, synthetic construct
  source 1..17: mol_type = other DNA
cattctcatgctctccc

SEQ ID NO: 29582 - DNA, 17 bp, synthetic construct
  source 1..17: mol_type = other DNA
acattctcatgctctcc

SEQ ID NO: 29583 - DNA, 17 bp, synthetic construct
  source 1..17: mol_type = other DNA
aacattctcatgctctc

SEQ ID NO: 29584 - DNA, 17 bp, synthetic construct
  source 1..17: mol_type = other DNA
taacattctcatgctct

SEQ ID NO: 29585 - DNA, 17 bp, synthetic construct
  source 1..17: mol_type = other DNA
ctaacattctcatgctc

SEQ ID NO: 29586 - DNA, 17 bp, synthetic construct
  source 1..17: mol_type = other DNA
cctaacattctcatgct

SEQ ID NO: 29587 - DNA, 17 bp, synthetic construct
  source 1..17: mol_type = other DNA
tcctaacattctcatgc

SEQ ID NO: 29588 - DNA, 17 bp, synthetic construct
  source 1..17: mol_type = other DNA
cttcctaacattctcat

SEQ ID NO: 29589 - DNA, 17 bp, synthetic construct
  source 1..17: mol_type = other DNA
ccttcctaacattctca

SEQ ID NO: 29590 - DNA, 17 bp, synthetic construct
  source 1..17: mol_type = other DNA
gccttcctaacattctc

SEQ ID NO: 29591 - DNA, 17 bp, synthetic construct
  source 1..17: mol_type = other DNA
tgccttcctaacattct

SEQ ID NO: 29592 - DNA, 17 bp, synthetic construct
  source 1..17: mol_type = other DNA
ctgccttcctaacattc

SEQ ID NO: 29593 - DNA, 17 bp, synthetic construct
  source 1..17: mol_type = other DNA
cctgccttcctaacatt

SEQ ID NO: 29594 - DNA, 17 bp, synthetic construct
  source 1..17: mol_type = other DNA
tcctgccttcctaacat

SEQ ID NO: 29595 - DNA, 17 bp, synthetic construct
  source 1..17: mol_type = other DNA
ctcctgccttcctaaca

SEQ ID NO: 29596 - DNA, 17 bp, synthetic construct
  source 1..17: mol_type = other DNA
tctcctgccttcctaac

SEQ ID NO: 29597 - DNA, 17 bp, synthetic construct
  source 1..17: mol_type = other DNA
ctctcctgccttcctaa

SEQ ID NO: 29598 - DNA, 17 bp, synthetic construct
  source 1..17: mol_type = other DNA
tctctcctgccttccta

SEQ ID NO: 29599 - DNA, 17 bp, synthetic construct
  source 1..17: mol_type = other DNA
agagtctctcctgcctt

SEQ ID NO: 29600 - DNA, 17 bp, synthetic construct
  source 1..17: mol_type = other DNA
gagagtctctcctgcct

SEQ ID NO: 29601 - DNA, 17 bp, synthetic construct
  source 1..17: mol_type = other DNA
tgagagtctctcctgcc

SEQ ID NO: 29602 - DNA, 17 bp, synthetic construct
  source 1..17: mol_type = other DNA
gtgagagtctctcctgc

SEQ ID NO: 29603 - DNA, 17 bp, synthetic construct
  source 1..17: mol_type = other DNA
tgtgagagtctctcctg

SEQ ID NO: 29604 - DNA, 17 bp, synthetic construct
  source 1..17: mol_type = other DNA
gtgtgagagtctctcct

SEQ ID NO: 29605 - DNA, 17 bp, synthetic construct
  source 1..17: mol_type = other DNA
tgtgtgagagtctctcc

SEQ ID NO: 29606 - DNA, 17 bp, synthetic construct
  source 1..17: mol_type = other DNA
atgtgtgagagtctctc

SEQ ID NO: 29607 - DNA, 17 bp, synthetic construct
  source 1..17: mol_type = other DNA
gatgtgtgagagtctct

SEQ ID NO: 29608 - DNA, 17 bp, synthetic construct
  source 1..17: mol_type = other DNA
agatgtgtgagagtctc

SEQ ID NO: 29609 - DNA, 17 bp, synthetic construct
  source 1..17: mol_type = other DNA
cagatgtgtgagagtct

SEQ ID NO: 29610 - DNA, 17 bp, synthetic construct
  source 1..17: mol_type = other DNA
ccagatgtgtgagagtc

SEQ ID NO: 29611 - DNA, 17 bp, synthetic construct
  source 1..17: mol_type = other DNA
cccagatgtgtgagagt

SEQ ID NO: 29612 - DNA, 17 bp, synthetic construct
  source 1..17: mol_type = other DNA
tcccagatgtgtgagag

SEQ ID NO: 29613 - DNA, 17 bp, synthetic construct
  source 1..17: mol_type = other DNA
ttcccagatgtgtgaga

SEQ ID NO: 29614 - DNA, 17 bp, synthetic construct
  source 1..17: mol_type = other DNA
cttcccagatgtgtgag

SEQ ID NO: 29615 - DNA, 17 bp, synthetic construct
  source 1..17: mol_type = other DNA
gcttcccagatgtgtga

SEQ ID NO: 29616 - DNA, 17 bp, synthetic construct
  source 1..17: mol_type = other DNA
agcttcccagatgtgtg

SEQ ID NO: 29617 - DNA, 17 bp, synthetic construct
  source 1..17: mol_type = other DNA
cagcttcccagatgtgt

SEQ ID NO: 29618 - DNA, 17 bp, synthetic construct
  source 1..17: mol_type = other DNA
tcagcttcccagatgtg

SEQ ID NO: 29619 - DNA, 17 bp, synthetic construct
  source 1..17: mol_type = other DNA
gtcagcttcccagatgt

SEQ ID NO: 29620 - DNA, 17 bp, synthetic construct
  source 1..17: mol_type = other DNA
tgtcagcttcccagatg

SEQ ID NO: 29621 - DNA, 17 bp, synthetic construct
  source 1..17: mol_type = other DNA
ttgtcagcttcccagat

SEQ ID NO: 29622 - DNA, 17 bp, synthetic construct
  source 1..17: mol_type = other DNA
attgtcagcttcccaga

SEQ ID NO: 29623 - DNA, 17 bp, synthetic construct
  source 1..17: mol_type = other DNA
gattgtcagcttcccag

SEQ ID NO: 29624 - DNA, 17 bp, synthetic construct
  source 1..17: mol_type = other DNA
ggattgtcagcttccca

SEQ ID NO: 29625 - DNA, 17 bp, synthetic construct
  source 1..17: mol_type = other DNA
tggattgtcagcttccc

SEQ ID NO: 29626 - DNA, 17 bp, synthetic construct
  source 1..17: mol_type = other DNA
atggattgtcagcttcc

SEQ ID NO: 29627 - DNA, 17 bp, synthetic construct
  source 1..17: mol_type = other DNA
gatggattgtcagcttc

SEQ ID NO: 29628 - DNA, 17 bp, synthetic construct
  source 1..17: mol_type = other DNA
tgatggattgtcagctt

SEQ ID NO: 29629 - DNA, 17 bp, synthetic construct
  source 1..17: mol_type = other DNA
ctgatggattgtcagct

SEQ ID NO: 29630 - DNA, 17 bp, synthetic construct
  source 1..17: mol_type = other DNA
gctgatggattgtcagc

SEQ ID NO: 29631 - DNA, 17 bp, synthetic construct
  source 1..17: mol_type = other DNA
tgctgatggattgtcag

SEQ ID NO: 29632 - DNA, 17 bp, synthetic construct
  source 1..17: mol_type = other DNA
atgctgatggattgtca

SEQ ID NO: 29633 - DNA, 17 bp, synthetic construct
  source 1..17: mol_type = other DNA
catgctgatggattgtc

SEQ ID NO: 29634 - DNA, 17 bp, synthetic construct
  source 1..17: mol_type = other DNA
acatgctgatggattgt

SEQ ID NO: 29635 - DNA, 17 bp, synthetic construct
  source 1..17: mol_type = other DNA
gacatgctgatggattg

SEQ ID NO: 29636 - DNA, 17 bp, synthetic construct
  source 1..17: mol_type = other DNA
ggacatgctgatggatt

SEQ ID NO: 29637 - DNA, 17 bp, synthetic construct
  source 1..17: mol_type = other DNA
tggacatgctgatggat

SEQ ID NO: 29638 - DNA, 17 bp, synthetic construct
  source 1..17: mol_type = other DNA
ctggacatgctgatgga

SEQ ID NO: 29639 - DNA, 17 bp, synthetic construct
  source 1..17: mol_type = other DNA
cctggacatgctgatgg

SEQ ID NO: 29640 - DNA, 17 bp, synthetic construct
  source 1..17: mol_type = other DNA
tcctggacatgctgatg

SEQ ID NO: 29641 - DNA, 17 bp, synthetic construct
  source 1..17: mol_type = other DNA
ctcctggacatgctgat

SEQ ID NO: 29642 - DNA, 17 bp, synthetic construct
  source 1..17: mol_type = other DNA
cctcctggacatgctga

SEQ ID NO: 29643 - DNA, 17 bp, synthetic construct
  source 1..17: mol_type = other DNA
tcctcctggacatgctg

SEQ ID NO: 29644 - DNA, 17 bp, synthetic construct
  source 1..17: mol_type = other DNA
ttcctcctggacatgct

SEQ ID NO: 29645 - DNA, 17 bp, synthetic construct
  source 1..17: mol_type = other DNA
tttcctcctggacatgc

SEQ ID NO: 29646 - DNA, 17 bp, synthetic construct
  source 1..17: mol_type = other DNA
ttttcctcctggacatg

SEQ ID NO: 29647 - DNA, 17 bp, synthetic construct
  source 1..17: mol_type = other DNA
attttcctcctggacat

SEQ ID NO: 29648 - DNA, 17 bp, synthetic construct
  source 1..17: mol_type = other DNA
tattttcctcctggaca

SEQ ID NO: 29649 - DNA, 17 bp, synthetic construct
  source 1..17: mol_type = other DNA
ttattttcctcctggac

SEQ ID NO: 29650 - DNA, 17 bp, synthetic construct
  source 1..17: mol_type = other DNA
cttattttcctcctgga

SEQ ID NO: 29651 - DNA, 17 bp, synthetic construct
  source 1..17: mol_type = other DNA
ccttattttcctcctgg

SEQ ID NO: 29652 - DNA, 17 bp, synthetic construct
  source 1..17: mol_type = other DNA
tccttattttcctcctg

SEQ ID NO: 29653 - DNA, 17 bp, synthetic construct
  source 1..17: mol_type = other DNA
ctccttattttcctcct

SEQ ID NO: 29654 - DNA, 17 bp, synthetic construct
  source 1..17: mol_type = other DNA
cctccttattttcctcc

SEQ ID NO: 29655 - DNA, 17 bp, synthetic construct
  source 1..17: mol_type = other DNA
tcctccttattttcctc

SEQ ID NO: 29656 - DNA, 17 bp, synthetic construct
  source 1..17: mol_type = other DNA
ctcctccttattttcct

SEQ ID NO: 29657 - DNA, 17 bp, synthetic construct
  source 1..17: mol_type = other DNA
cctcctccttattttcc

SEQ ID NO: 29658 - DNA, 17 bp, synthetic construct
  source 1..17: mol_type = other DNA
tcctcctccttattttc

SEQ ID NO: 29659 - DNA, 17 bp, synthetic construct
  source 1..17: mol_type = other DNA
ctcctcctccttatttt

SEQ ID NO: 29660 - DNA, 17 bp, synthetic construct
  source 1..17: mol_type = other DNA
gctcctcctccttattt

SEQ ID NO: 29661 - DNA, 17 bp, synthetic construct
  source 1..17: mol_type = other DNA
tgctcctcctccttatt

SEQ ID NO: 29662 - DNA, 17 bp, synthetic construct
  source 1..17: mol_type = other DNA
ctgctcctcctccttat

SEQ ID NO: 29663 - DNA, 17 bp, synthetic construct
  source 1..17: mol_type = other DNA
tctgctcctcctcctta

SEQ ID NO: 29664 - DNA, 17 bp, synthetic construct
  source 1..17: mol_type = other DNA
atttctgctcctcctcc

SEQ ID NO: 29665 - DNA, 17 bp, synthetic construct
  source 1..17: mol_type = other DNA
tatttctgctcctcctc

SEQ ID NO: 29666 - DNA, 17 bp, synthetic construct
  source 1..17: mol_type = other DNA
ctatttctgctcctcct

SEQ ID NO: 29667 - DNA, 17 bp, synthetic construct
  source 1..17: mol_type = other DNA
tctatttctgctcctcc

SEQ ID NO: 29668 - DNA, 17 bp, synthetic construct
  source 1..17: mol_type = other DNA
atctatttctgctcctc

SEQ ID NO: 29669 - DNA, 17 bp, synthetic construct
  source 1..17: mol_type = other DNA
catctatttctgctcct

SEQ ID NO: 29670 - DNA, 17 bp, synthetic construct
  source 1..17: mol_type = other DNA
tcatctatttctgctcc

SEQ ID NO: 29671 - DNA, 17 bp, synthetic construct
  source 1..17: mol_type = other DNA
ctcatctatttctgctc

SEQ ID NO: 29672 - DNA, 17 bp, synthetic construct
  source 1..17: mol_type = other DNA
cctcatctatttctgct

SEQ ID NO: 29673 - DNA, 17 bp, synthetic construct
  source 1..17: mol_type = other DNA
gcctcatctatttctgc

SEQ ID NO: 29674 - DNA, 17 bp, synthetic construct
  source 1..17: mol_type = other DNA
agcctcatctatttctg

SEQ ID NO: 29675 - DNA, 17 bp, synthetic construct
  source 1..17: mol_type = other DNA
cagcctcatctatttct

SEQ ID NO: 29676 - DNA, 17 bp, synthetic construct
  source 1..17: mol_type = other DNA
ccagcctcatctatttc

SEQ ID NO: 29677 - DNA, 17 bp, synthetic construct
  source 1..17: mol_type = other DNA
tccagcctcatctattt

SEQ ID NO: 29678 - DNA, 17 bp, synthetic construct
  source 1..17: mol_type = other DNA
atccagcctcatctatt

SEQ ID NO: 29679 - DNA, 17 bp, synthetic construct
  source 1..17: mol_type = other DNA
tatccagcctcatctat

SEQ ID NO: 29680 - DNA, 17 bp, synthetic construct
  source 1..17: mol_type = other DNA
atatccagcctcatcta

SEQ ID NO: 29681 - DNA, 17 bp, synthetic construct
  source 1..17: mol_type = other DNA
tatatccagcctcatct

SEQ ID NO: 29682 - DNA, 17 bp, synthetic construct
  source 1..17: mol_type = other DNA
ctatatccagcctcatc

SEQ ID NO: 29683 - DNA, 17 bp, synthetic construct
  source 1..17: mol_type = other DNA
tctatatccagcctcat

SEQ ID NO: 29684 - DNA, 17 bp, synthetic construct
  source 1..17: mol_type = other DNA
ttctatatccagcctca

SEQ ID NO: 29685 - DNA, 17 bp, synthetic construct
  source 1..17: mol_type = other DNA
cttctatatccagcctc

SEQ ID NO: 29686 - DNA, 17 bp, synthetic construct
  source 1..17: mol_type = other DNA
gcttctatatccagcct

SEQ ID NO: 29687 - DNA, 17 bp, synthetic construct
  source 1..17: mol_type = other DNA
tgcttctatatccagcc

SEQ ID NO: 29688 - DNA, 17 bp, synthetic construct
  source 1..17: mol_type = other DNA
ctgcttctatatccagc

SEQ ID NO: 29689 - DNA, 17 bp, synthetic construct
  source 1..17: mol_type = other DNA
cctgcttctatatccag

SEQ ID NO: 29690 - DNA, 17 bp, synthetic construct
  source 1..17: mol_type = other DNA
ccctgcttctatatcca

SEQ ID NO: 29691 - DNA, 17 bp, synthetic construct
  source 1..17: mol_type = other DNA
gccctgcttctatatcc

SEQ ID NO: 29692 - DNA, 17 bp, synthetic construct
  source 1..17: mol_type = other DNA
agccctgcttctatatc

SEQ ID NO: 29693 - DNA, 17 bp, synthetic construct
  source 1..17: mol_type = other DNA
cagccctgcttctatat

SEQ ID NO: 29694 - DNA, 17 bp, synthetic construct
  source 1..17: mol_type = other DNA
tcagccctgcttctata

SEQ ID NO: 29695 - DNA, 17 bp, synthetic construct
  source 1..17: mol_type = other DNA
ttcagccctgcttctat

SEQ ID NO: 29696 - DNA, 17 bp, synthetic construct
  source 1..17: mol_type = other DNA
cttcagccctgcttcta

SEQ ID NO: 29697 - DNA, 17 bp, synthetic construct
  source 1..17: mol_type = other DNA
cacagcttcagccctgc

SEQ ID NO: 29698 - DNA, 17 bp, synthetic construct
  source 1..17: mol_type = other DNA
acacagcttcagccctg

SEQ ID NO: 29699 - DNA, 17 bp, synthetic construct
  source 1..17: mol_type = other DNA
aacacagcttcagccct

SEQ ID NO: 29700 - DNA, 17 bp, synthetic construct
  source 1..17: mol_type = other DNA
caacacagcttcagccc

SEQ ID NO: 29701 - DNA, 17 bp, synthetic construct
  source 1..17: mol_type = other DNA
acaacacagcttcagcc

SEQ ID NO: 29702 - DNA, 17 bp, synthetic construct
  source 1..17: mol_type = other DNA
aacaacacagcttcagc

SEQ ID NO: 29703 - DNA, 17 bp, synthetic construct
  source 1..17: mol_type = other DNA
cacaactctttaccaca

SEQ ID NO: 29704 - DNA, 17 bp, synthetic construct
  source 1..17: mol_type = other DNA
tcacaactctttaccac

SEQ ID NO: 29705 - DNA, 17 bp, synthetic construct
  source 1..17: mol_type = other DNA
atcacaactctttacca

SEQ ID NO: 29706 - DNA, 17 bp, synthetic construct
  source 1..17: mol_type = other DNA
ccttctggatagaatca

SEQ ID NO: 29707 - DNA, 17 bp, synthetic construct
  source 1..17: mol_type = other DNA
gccttctggatagaatc

SEQ ID NO: 29708 - DNA, 17 bp, synthetic construct
  source 1..17: mol_type = other DNA
tgccttctggatagaat

SEQ ID NO: 29709 - DNA, 17 bp, synthetic construct
  source 1..17: mol_type = other DNA
ttgccttctggatagaa

SEQ ID NO: 29710 - DNA, 17 bp, synthetic construct
  source 1..17: mol_type = other DNA
attgccttctggataga

SEQ ID NO: 29711 - DNA, 17 bp, synthetic construct
  source 1..17: mol_type = other DNA
tattgccttctggatag

SEQ ID NO: 29712 - DNA, 17 bp, synthetic construct
  source 1..17: mol_type = other DNA
ctattgccttctggata

SEQ ID NO: 29713 - DNA, 17 bp, synthetic construct
  source 1..17: mol_type = other DNA
cctattgccttctggat

SEQ ID NO: 29714 - DNA, 17 bp, synthetic construct
  source 1..17: mol_type = other DNA
acctattgccttctgga

SEQ ID NO: 29715 - DNA, 17 bp, synthetic construct
  source 1..17: mol_type = other DNA
tacctattgccttctgg

SEQ ID NO: 29716 - DNA, 17 bp, synthetic construct
  source 1..17: mol_type = other DNA
ctacctattgccttctg

SEQ ID NO: 29717 - DNA, 17 bp, synthetic construct
  source 1..17: mol_type = other DNA
gccctttgcagaaaata

SEQ ID NO: 29718 - DNA, 17 bp, synthetic construct
  source 1..17: mol_type = other DNA
agccctttgcagaaaat

SEQ ID NO: 29719 - DNA, 17 bp, synthetic construct
  source 1..17: mol_type = other DNA
tagccctttgcagaaaa

SEQ ID NO: 29720 - DNA, 17 bp, synthetic construct
  source 1..17: mol_type = other DNA
ttagccctttgcagaaa

SEQ ID NO: 29721 - DNA, 17 bp, synthetic construct
  source 1..17: mol_type = other DNA
tttagccctttgcagaa

SEQ ID NO: 29722 - DNA, 17 bp, synthetic construct
  source 1..17: mol_type = other DNA
atttagccctttgcaga

SEQ ID NO: 29723 - DNA, 17 bp, synthetic construct
  source 1..17: mol_type = other DNA
catttagccctttgcag

SEQ ID NO: 29724 - DNA, 17 bp, synthetic construct
  source 1..17: mol_type = other DNA
acatttagccctttgca

SEQ ID NO: 29725 - DNA, 17 bp, synthetic construct
  source 1..17: mol_type = other DNA
aacatttagccctttgc

SEQ ID NO: 29726 - DNA, 17 bp, synthetic construct
  source 1..17: mol_type = other DNA
taacatttagccctttg

SEQ ID NO: 29727 - DNA, 17 bp, synthetic construct
  source 1..17: mol_type = other DNA
ttaacatttagcccttt

SEQ ID NO: 29728 - DNA, 17 bp, synthetic construct
  source 1..17: mol_type = other DNA
tttaacatttagccctt

SEQ ID NO: 29729 - DNA, 17 bp, synthetic construct
  source 1..17: mol_type = other DNA
atttaacatttagccct

SEQ ID NO: 29730 - DNA, 17 bp, synthetic construct
  source 1..17: mol_type = other DNA
accatatggcttggaaa

SEQ ID NO: 29731 - DNA, 17 bp, synthetic construct
  source 1..17: mol_type = other DNA
gaccatatggcttggaa

SEQ ID NO: 29732 - DNA, 17 bp, synthetic construct
  source 1..17: mol_type = other DNA
agaccatatggcttgga

SEQ ID NO: 29733 - DNA, 17 bp, synthetic construct
  source 1..17: mol_type = other DNA
gagaccatatggcttgg

SEQ ID NO: 29734 - DNA, 17 bp, synthetic construct
  source 1..17: mol_type = other DNA
agagaccatatggcttg

SEQ ID NO: 29735 - DNA, 17 bp, synthetic construct
  source 1..17: mol_type = other DNA
gagagaccatatggctt

SEQ ID NO: 29736 - DNA, 17 bp, synthetic construct
  source 1..17: mol_type = other DNA
agagagaccatatggct

SEQ ID NO: 29737 - DNA, 17 bp, synthetic construct
  source 1..17: mol_type = other DNA
gagagagaccatatggc

SEQ ID NO: 29738 - DNA, 17 bp, synthetic construct
  source 1..17: mol_type = other DNA
agagagagaccatatgg

SEQ ID NO: 29739 - DNA, 17 bp, synthetic construct
  source 1..17: mol_type = other DNA
cattgagagagagacca

SEQ ID NO: 29740 - DNA, 17 bp, synthetic construct
  source 1..17: mol_type = other DNA
tcattgagagagagacc

SEQ ID NO: 29741 - DNA, 17 bp, synthetic construct
  source 1..17: mol_type = other DNA
gctgagtcattgagaga

SEQ ID NO: 29742 - DNA, 17 bp, synthetic construct
  source 1..17: mol_type = other DNA
agctgagtcattgagag

SEQ ID NO: 29743 - DNA, 17 bp, synthetic construct
  source 1..17: mol_type = other DNA
gagctgagtcattgaga

SEQ ID NO: 29744 - DNA, 17 bp, synthetic construct
  source 1..17: mol_type = other DNA
agagctgagtcattgag

SEQ ID NO: 29745 - DNA, 17 bp, synthetic construct
  source 1..17: mol_type = other DNA
aagagctgagtcattga

SEQ ID NO: 29746 - DNA, 17 bp, synthetic construct
  source 1..17: mol_type = other DNA
gaagagctgagtcattg

SEQ ID NO: 29747 - DNA, 17 bp, synthetic construct
  source 1..17: mol_type = other DNA
ggaagagctgagtcatt

SEQ ID NO: 29748 - DNA, 17 bp, synthetic construct
  source 1..17: mol_type = other DNA
tggaagagctgagtcat

SEQ ID NO: 29749 - DNA, 17 bp, synthetic construct
  source 1..17: mol_type = other DNA
atggaagagctgagtca

SEQ ID NO: 29750 - DNA, 17 bp, synthetic construct
  source 1..17: mol_type = other DNA
gctactttcatggtata

SEQ ID NO: 29751 - DNA, 17 bp, synthetic construct
  source 1..17: mol_type = other DNA
ggctactttcatggtat

SEQ ID NO: 29752 - DNA, 17 bp, synthetic construct
  source 1..17: mol_type = other DNA
tggctactttcatggta

SEQ ID NO: 29753 - DNA, 17 bp, synthetic construct
  source 1..17: mol_type = other DNA
ctggctactttcatggt

SEQ ID NO: 29754 - DNA, 17 bp, synthetic construct
  source 1..17: mol_type = other DNA
tctggctactttcatgg

SEQ ID NO: 29755 - DNA, 17 bp, synthetic construct
  source 1..17: mol_type = other DNA
ctctggctactttcatg

SEQ ID NO: 29756 - DNA, 17 bp, synthetic construct
  source 1..17: mol_type = other DNA
tctctggctactttcat

SEQ ID NO: 29757 - DNA, 17 bp, synthetic construct
  source 1..17: mol_type = other DNA
gtctctggctactttca

SEQ ID NO: 29758 - DNA, 17 bp, synthetic construct
  source 1..17: mol_type = other DNA
cgtctctggctactttc

SEQ ID NO: 29759 - DNA, 17 bp, synthetic construct
  source 1..17: mol_type = other DNA
tgacacagtctgcgttt

SEQ ID NO: 29760 - DNA, 17 bp, synthetic construct
  source 1..17: mol_type = other DNA
ctgacacagtctgcgtt

SEQ ID NO: 29761 - DNA, 17 bp, synthetic construct
  source 1..17: mol_type = other DNA
tctgacacagtctgcgt

SEQ ID NO: 29762 - DNA, 17 bp, synthetic construct
  source 1..17: mol_type = other DNA
gtctgacacagtctgcg

SEQ ID NO: 29763 - DNA, 17 bp, synthetic construct
  source 1..17: mol_type = other DNA
tgtctgacacagtctgc

SEQ ID NO: 29764 - DNA, 17 bp, synthetic construct
  source 1..17: mol_type = other DNA
atgtctgacacagtctg

SEQ ID NO: 29765 - DNA, 17 bp, synthetic construct
  source 1..17: mol_type = other DNA
tatgtctgacacagtct

SEQ ID NO: 29766 - DNA, 17 bp, synthetic construct
  source 1..17: mol_type = other DNA
ctatgtctgacacagtc

SEQ ID NO: 29767 - DNA, 17 bp, synthetic construct
  source 1..17: mol_type = other DNA
actatgtctgacacagt

SEQ ID NO: 29768 - DNA, 17 bp, synthetic construct
  source 1..17: mol_type = other DNA
gactatgtctgacacag

SEQ ID NO: 29769 - DNA, 17 bp, synthetic construct
  source 1..17: mol_type = other DNA
ggactatgtctgacaca

SEQ ID NO: 29770 - DNA, 17 bp, synthetic construct
  source 1..17: mol_type = other DNA
tggactatgtctgacac

SEQ ID NO: 29771 - DNA, 17 bp, synthetic construct
  source 1..17: mol_type = other DNA
atggactatgtctgaca

SEQ ID NO: 29772 - DNA, 17 bp, synthetic construct
  source 1..17: mol_type = other DNA
catggactatgtctgac

SEQ ID NO: 29773 - DNA, 17 bp, synthetic construct
  source 1..17: mol_type = other DNA
acatggactatgtctga

SEQ ID NO: 29774 - DNA, 17 bp, synthetic construct
  source 1..17: mol_type = other DNA
ccatacatggactatgt

SEQ ID NO: 29775 - DNA, 17 bp, synthetic construct
  source 1..17: mol_type = other DNA
ctaccatacatggacta

SEQ ID NO: 29776 - DNA, 17 bp, synthetic construct
  source 1..17: mol_type = other DNA
actaccatacatggact

SEQ ID NO: 29777 - DNA, 17 bp, synthetic construct
  source 1..17: mol_type = other DNA
tctccatcacatcataa

SEQ ID NO: 29778 - DNA, 17 bp, synthetic construct
  source 1..17: mol_type = other DNA
ttctccatcacatcata

SEQ ID NO: 29779 - DNA, 17 bp, synthetic construct
  source 1..17: mol_type = other DNA
attctccatcacatcat

SEQ ID NO: 29780 - DNA, 17 bp, synthetic construct
  source 1..17: mol_type = other DNA
aattctccatcacatca

SEQ ID NO: 29781 - DNA, 17 bp, synthetic construct
  source 1..17: mol_type = other DNA
gaattctccatcacatc

SEQ ID NO: 29782 - DNA, 17 bp, synthetic construct
  source 1..17: mol_type = other DNA
ggaattctccatcacat

SEQ ID NO: 29783 - DNA, 17 bp, synthetic construct
  source 1..17: mol_type = other DNA
aggaattctccatcaca

SEQ ID NO: 29784 - DNA, 17 bp, synthetic construct
  source 1..17: mol_type = other DNA
taggaattctccatcac

SEQ ID NO: 29785 - DNA, 17 bp, synthetic construct
  source 1..17: mol_type = other DNA
gtaggaattctccatca

SEQ ID NO: 29786 - DNA, 17 bp, synthetic construct
  source 1..17: mol_type = other DNA
tgtaggaattctccatc

SEQ ID NO: 29787 - DNA, 17 bp, synthetic construct
  source 1..17: mol_type = other DNA
ttgtaggaattctccat

SEQ ID NO: 29788 - DNA, 17 bp, synthetic construct
  source 1..17: mol_type = other DNA
cttgtaggaattctcca

SEQ ID NO: 29789 - DNA, 17 bp, synthetic construct
  source 1..17: mol_type = other DNA
tcttgtaggaattctcc

SEQ ID NO: 29790 - DNA, 17 bp, synthetic construct
  source 1..17: mol_type = other DNA
ctcttgtaggaattctc

SEQ ID NO: 29791 - DNA, 17 bp, synthetic construct
  source 1..17: mol_type = other DNA
actcttgtaggaattct

SEQ ID NO: 29792 - DNA, 17 bp, synthetic construct
  source 1..17: mol_type = other DNA
gttcactctaccattta

SEQ ID NO: 29793 - DNA, 17 bp, synthetic construct
  source 1..17: mol_type = other DNA
tgttcactctaccattt

SEQ ID NO: 29794 - DNA, 17 bp, synthetic construct
  source 1..17: mol_type = other DNA
atgttcactctaccatt

SEQ ID NO: 29795 - DNA, 17 bp, synthetic construct
  source 1..17: mol_type = other DNA
tatgttcactctaccat

SEQ ID NO: 29796 - DNA, 17 bp, synthetic construct
  source 1..17: mol_type = other DNA
gtatgttcactctacca

SEQ ID NO: 29797 - DNA, 17 bp, synthetic construct
  source 1..17: mol_type = other DNA
tgtatgttcactctacc

SEQ ID NO: 29798 - DNA, 17 bp, synthetic construct
  source 1..17: mol_type = other DNA
gtgtatgttcactctac

SEQ ID NO: 29799 - DNA, 17 bp, synthetic construct
  source 1..17: mol_type = other DNA
agtgtatgttcactcta

SEQ ID NO: 29800 - DNA, 17 bp, synthetic construct
  source 1..17: mol_type = other DNA
cagtgtatgttcactct

SEQ ID NO: 29801 - DNA, 17 bp, synthetic construct
  source 1..17: mol_type = other DNA
ccagtgtatgttcactc

SEQ ID NO: 29802 - DNA, 17 bp, synthetic construct
  source 1..17: mol_type = other DNA
tccagtgtatgttcact

SEQ ID NO: 29803 - DNA, 17 bp, synthetic construct
  source 1..17: mol_type = other DNA
ttccagtgtatgttcac

SEQ ID NO: 29804 - DNA, 17 bp, synthetic construct
  source 1..17: mol_type = other DNA
attccagtgtatgttca

SEQ ID NO: 29805 - DNA, 17 bp, synthetic construct
  source 1..17: mol_type = other DNA
aattccagtgtatgttc

SEQ ID NO: 29806 - DNA, 17 bp, synthetic construct
  source 1..17: mol_type = other DNA
gaattccagtgtatgtt

SEQ ID NO: 29807 - DNA, 17 bp, synthetic construct
  source 1..17: mol_type = other DNA
agaattccagtgtatgt

SEQ ID NO: 29808 - DNA, 17 bp, synthetic construct
  source 1..17: mol_type = other DNA
gtatagaattccagtgt

SEQ ID NO: 29809 - DNA, 17 bp, synthetic construct
  source 1..17: mol_type = other DNA
gcagtatagaattccag

SEQ ID NO: 29810 - DNA, 17 bp, synthetic construct
  source 1..17: mol_type = other DNA
gggtcaagcagtataga

SEQ ID NO: 29811 - DNA, 17 bp, synthetic construct
  source 1..17: mol_type = other DNA
tgggtcaagcagtatag

SEQ ID NO: 29812 - DNA, 17 bp, synthetic construct
  source 1..17: mol_type = other DNA
ttgggtcaagcagtata

SEQ ID NO: 29813 - DNA, 17 bp, synthetic construct
  source 1..17: mol_type = other DNA
cttgggtcaagcagtat

SEQ ID NO: 29814 - DNA, 17 bp, synthetic construct
  source 1..17: mol_type = other DNA
gcttgggtcaagcagta

SEQ ID NO: 29815 - DNA, 17 bp, synthetic construct
  source 1..17: mol_type = other DNA
agcttgggtcaagcagt

SEQ ID NO: 29816 - DNA, 17 bp, synthetic construct
  source 1..17: mol_type = other DNA
aagcttgggtcaagcag

SEQ ID NO: 29817 - DNA, 17 bp, synthetic construct
  source 1..17: mol_type = other DNA
aaagcttgggtcaagca

SEQ ID NO: 29818 - DNA, 17 bp, synthetic construct
  source 1..17: mol_type = other DNA
aaaagcttgggtcaagc

SEQ ID NO: 29819 - DNA, 17 bp, synthetic construct
  source 1..17: mol_type = other DNA
atcaaaagcttgggtca

SEQ ID NO: 29820 - DNA, 17 bp, synthetic construct
  source 1..17: mol_type = other DNA
gctatcaaaagcttggg

SEQ ID NO: 29821 - DNA, 17 bp, synthetic construct
  source 1..17: mol_type = other DNA
ctaccttttgctatcaa

SEQ ID NO: 29822 - DNA, 17 bp, synthetic construct
  source 1..17: mol_type = other DNA
tctaccttttgctatca

SEQ ID NO: 29823 - DNA, 17 bp, synthetic construct
  source 1..17: mol_type = other DNA
ttctaccttttgctatc

SEQ ID NO: 29824 - DNA, 17 bp, synthetic construct
  source 1..17: mol_type = other DNA
tttctaccttttgctat

SEQ ID NO: 29825 - DNA, 17 bp, synthetic construct
  source 1..17: mol_type = other DNA
ttttctaccttttgcta

SEQ ID NO: 29826 - DNA, 17 bp, synthetic construct
  source 1..17: mol_type = other DNA
cttttctaccttttgct

SEQ ID NO: 29827 - DNA, 17 bp, synthetic construct
  source 1..17: mol_type = other DNA
tcttttctaccttttgc

SEQ ID NO: 29828 - DNA, 17 bp, synthetic construct
  source 1..17: mol_type = other DNA
gtcttttctaccttttg

SEQ ID NO: 29829 - DNA, 17 bp, synthetic construct
  source 1..17: mol_type = other DNA
tgtcttttctacctttt

SEQ ID NO: 29830 - DNA, 17 bp, synthetic construct
  source 1..17: mol_type = other DNA
ctgtcttttctaccttt

SEQ ID NO: 29831 - DNA, 17 bp, synthetic construct
  source 1..17: mol_type = other DNA
tctgtcttttctacctt

SEQ ID NO: 29832 - DNA, 17 bp, synthetic construct
  source 1..17: mol_type = other DNA
atctgtcttttctacct

SEQ ID NO: 29833 - DNA, 17 bp, synthetic construct
  source 1..17: mol_type = other DNA
caccctgagctatgact

SEQ ID NO: 29834 - DNA, 17 bp, synthetic construct
  source 1..17: mol_type = other DNA
acaccctgagctatgac

SEQ ID NO: 29835 - DNA, 17 bp, synthetic construct
  source 1..17: mol_type = other DNA
aacaccctgagctatga

SEQ ID NO: 29836 - DNA, 17 bp, synthetic construct
  source 1..17: mol_type = other DNA
aaacaccctgagctatg

SEQ ID NO: 29837 - DNA, 17 bp, synthetic construct
  source 1..17: mol_type = other DNA
caaacaccctgagctat

SEQ ID NO: 29838 - DNA, 17 bp, synthetic construct
  source 1..17: mol_type = other DNA
tcaaacaccctgagcta

SEQ ID NO: 29839 - DNA, 17 bp, synthetic construct
  source 1..17: mol_type = other DNA
gtcaaacaccctgagct

SEQ ID NO: 29840 - DNA, 17 bp, synthetic construct
  source 1..17: mol_type = other DNA
agtcaaacaccctgagc

SEQ ID NO: 29841 - DNA, 17 bp, synthetic construct
  source 1..17: mol_type = other DNA
aagtcaaacaccctgag

SEQ ID NO: 29842 - DNA, 17 bp, synthetic construct
  source 1..17: mol_type = other DNA
gaagtcaaacaccctga

SEQ ID NO: 29843 - DNA, 17 bp, synthetic construct
  source 1..17: mol_type = other DNA
agaagtcaaacaccctg

SEQ ID NO: 29844 - DNA, 17 bp, synthetic construct
  source 1..17: mol_type = other DNA
accccacagaaaagcaa

SEQ ID NO: 29845 - DNA, 17 bp, synthetic construct
  source 1..17: mol_type = other DNA
aaccccacagaaaagca

SEQ ID NO: 29846 - DNA, 17 bp, synthetic construct
  source 1..17: mol_type = other DNA
aggctgctgtgacaaaa

SEQ ID NO: 29847 - DNA, 17 bp, synthetic construct
  source 1..17: mol_type = other DNA
aaggctgctgtgacaaa

SEQ ID NO: 29848 - DNA, 17 bp, synthetic construct
  source 1..17: mol_type = other DNA
aaaggctgctgtgacaa

SEQ ID NO: 29849 - DNA, 17 bp, synthetic construct
  source 1..17: mol_type = other DNA
caaaggctgctgtgaca

SEQ ID NO: 29850 - DNA, 17 bp, synthetic construct
  source 1..17: mol_type = other DNA
acaaaggctgctgtgac

SEQ ID NO: 29851 - DNA, 17 bp, synthetic construct
  source 1..17: mol_type = other DNA
gacaaaggctgctgtga

SEQ ID NO: 29852 - DNA, 17 bp, synthetic construct
  source 1..17: mol_type = other DNA
cgacaaaggctgctgtg

SEQ ID NO: 29853 - DNA, 17 bp, synthetic construct
  source 1..17: mol_type = other DNA
gcgacaaaggctgctgt

SEQ ID NO: 29854 - DNA, 17 bp, synthetic construct
  source 1..17: mol_type = other DNA
agcgacaaaggctgctg

SEQ ID NO: 29855 - DNA, 17 bp, synthetic construct
  source 1..17: mol_type = other DNA
aagcgacaaaggctgct

SEQ ID NO: 29856 - DNA, 17 bp, synthetic construct
  source 1..17: mol_type = other DNA
gaagcgacaaaggctgc

SEQ ID NO: 29857 - DNA, 17 bp, synthetic construct
  source 1..17: mol_type = other DNA
ggtgtttgaagcgacaa

SEQ ID NO: 29858 - DNA, 17 bp, synthetic construct
  source 1..17: mol_type = other DNA
cggtgtttgaagcgaca

SEQ ID NO: 29859 - DNA, 17 bp, synthetic construct
  source 1..17: mol_type = other DNA
gcggtgtttgaagcgac

SEQ ID NO: 29860 - DNA, 17 bp, synthetic construct
  source 1..17: mol_type = other DNA
tgcggtgtttgaagcga

SEQ ID NO: 29861 - DNA, 17 bp, synthetic construct
  source 1..17: mol_type = other DNA
ttgcggtgtttgaagcg

SEQ ID NO: 29862 - DNA, 17 bp, synthetic construct
  source 1..17: mol_type = other DNA
cttgcggtgtttgaagc

SEQ ID NO: 29863 - DNA, 17 bp, synthetic construct
  source 1..17: mol_type = other DNA
acttgcggtgtttgaag

SEQ ID NO: 29864 - DNA, 17 bp, synthetic construct
  source 1..17: mol_type = other DNA
cacttgcggtgtttgaa

SEQ ID NO: 29865 - DNA, 17 bp, synthetic construct
  source 1..17: mol_type = other DNA
acacttgcggtgtttga

SEQ ID NO: 29866 - DNA, 17 bp, synthetic construct
  source 1..17: mol_type = other DNA
aacacttgcggtgtttg

SEQ ID NO: 29867 - DNA, 17 bp, synthetic construct
  source 1..17: mol_type = other DNA
gaacacttgcggtgttt

SEQ ID NO: 29868 - DNA, 17 bp, synthetic construct
  source 1..17: mol_type = other DNA
agaacacttgcggtgtt

SEQ ID NO: 29869 - DNA, 17 bp, synthetic construct
  source 1..17: mol_type = other DNA
aagaacacttgcggtgt

SEQ ID NO: 29870 - DNA, 17 bp, synthetic construct
  source 1..17: mol_type = other DNA
gttgcatttcacttgaa

SEQ ID NO: 29871 - DNA, 17 bp, synthetic construct
  source 1..17: mol_type = other DNA
tgttgcatttcacttga

SEQ ID NO: 29872 - DNA, 17 bp, synthetic construct
  source 1..17: mol_type = other DNA
atgttgcatttcacttg

SEQ ID NO: 29873 - DNA, 17 bp, synthetic construct
  source 1..17: mol_type = other DNA
catgttgcatttcactt

SEQ ID NO: 29874 - DNA, 17 bp, synthetic construct
  source 1..17: mol_type = other DNA
acatgttgcatttcact

SEQ ID NO: 29875 - DNA, 17 bp, synthetic construct
  source 1..17: mol_type = other DNA
gacatgttgcatttcac

SEQ ID NO: 29876 - DNA, 17 bp, synthetic construct
  source 1..17: mol_type = other DNA
agacatgttgcatttca

SEQ ID NO: 29877 - DNA, 17 bp, synthetic construct
  source 1..17: mol_type = other DNA
cagacatgttgcatttc

SEQ ID NO: 29878 - DNA, 17 bp, synthetic construct
  source 1..17: mol_type = other DNA
tcagacatgttgcattt

SEQ ID NO: 29879 - DNA, 17 bp, synthetic construct
  source 1..17: mol_type = other DNA
ttcagacatgttgcatt

SEQ ID NO: 29880 - DNA, 17 bp, synthetic construct
  source 1..17: mol_type = other DNA
tttcagacatgttgcat

SEQ ID NO: 29881 - DNA, 17 bp, synthetic construct
  source 1..17: mol_type = other DNA
gtttcagacatgttgca

SEQ ID NO: 29882 - DNA, 17 bp, synthetic construct
  source 1..17: mol_type = other DNA
cgtttcagacatgttgc

SEQ ID NO: 29883 - DNA, 17 bp, synthetic construct
  source 1..17: mol_type = other DNA
acgtttcagacatgttg

SEQ ID NO: 29884 - DNA, 17 bp, synthetic construct
  source 1..17: mol_type = other DNA
cacgtttcagacatgtt

SEQ ID NO: 29885 - DNA, 17 bp, synthetic construct
  source 1..17: mol_type = other DNA
ccacgtttcagacatgt

SEQ ID NO: 29886 - DNA, 17 bp, synthetic construct
  source 1..17: mol_type = other DNA
accacgtttcagacatg

SEQ ID NO: 29887 - DNA, 17 bp, synthetic construct
  source 1..17: mol_type = other DNA
taccacgtttcagacat

SEQ ID NO: 29888 - DNA, 17 bp, synthetic construct
  source 1..17: mol_type = other DNA
ataccacgtttcagaca

SEQ ID NO: 29889 - DNA, 17 bp, synthetic construct
  source 1..17: mol_type = other DNA
gataccacgtttcagac

SEQ ID NO: 29890 - DNA, 17 bp, synthetic construct
  source 1..17: mol_type = other DNA
agataccacgtttcaga

SEQ ID NO: 29891 - DNA, 17 bp, synthetic construct
  source 1..17: mol_type = other DNA
cagataccacgtttcag

SEQ ID NO: 29892 - DNA, 17 bp, synthetic construct
  source 1..17: mol_type = other DNA
ccagataccacgtttca

SEQ ID NO: 29893 - DNA, 17 bp, synthetic construct
  source 1..17: mol_type = other DNA
tccagataccacgtttc

SEQ ID NO: 29894 - DNA, 17 bp, synthetic construct
  source 1..17: mol_type = other DNA
ctccagataccacgttt

SEQ ID NO: 29895 - DNA, 17 bp, synthetic construct
  source 1..17: mol_type = other DNA
tctccagataccacgtt

SEQ ID NO: 29896 - DNA, 17 bp, synthetic construct
  source 1..17: mol_type = other DNA
ctctccagataccacgt

SEQ ID NO: 29897 - DNA, 17 bp, synthetic construct
  source 1..17: mol_type = other DNA
cctctccagataccacg

SEQ ID NO: 29898 - DNA, 17 bp, synthetic construct
  source 1..17: mol_type = other DNA
acctctccagataccac

SEQ ID NO: 29899 - DNA, 17 bp, synthetic construct
  source 1..17: mol_type = other DNA
cacctctccagatacca

SEQ ID NO: 29900 - DNA, 17 bp, synthetic construct
  source 1..17: mol_type = other DNA
tcacctctccagatacc

SEQ ID NO: 29901 - DNA, 17 bp, synthetic construct
  source 1..17: mol_type = other DNA
ctcacctctccagatac

SEQ ID NO: 29902 - DNA, 17 bp, synthetic construct
  source 1..17: mol_type = other DNA
tctcacctctccagata

SEQ ID NO: 29903 - DNA, 17 bp, synthetic construct
  source 1..17: mol_type = other DNA
atctcacctctccagat

SEQ ID NO: 29904 - DNA, 17 bp, synthetic construct
  source 1..17: mol_type = other DNA
catctcacctctccaga

SEQ ID NO: 29905 - DNA, 17 bp, synthetic construct
  source 1..17: mol_type = other DNA
ccatctcacctctccag

SEQ ID NO: 29906 - DNA, 17 bp, synthetic construct
  source 1..17: mol_type = other DNA
tccatctcacctctcca

SEQ ID NO: 29907 - DNA, 17 bp, synthetic construct
  source 1..17: mol_type = other DNA
tgtccatctcacctctc

SEQ ID NO: 29908 - DNA, 17 bp, synthetic construct
  source 1..17: mol_type = other DNA
ttgtccatctcacctct

SEQ ID NO: 29909 - DNA, 17 bp, synthetic construct
  source 1..17: mol_type = other DNA
tttgtccatctcacctc

SEQ ID NO: 29910 - DNA, 17 bp, synthetic construct
  source 1..17: mol_type = other DNA
ctttgtccatctcacct

SEQ ID NO: 29911 - DNA, 17 bp, synthetic construct
  source 1..17: mol_type = other DNA
cctttgtccatctcacc

SEQ ID NO: 29912 - DNA, 17 bp, synthetic construct
  source 1..17: mol_type = other DNA
tcctttgtccatctcac

SEQ ID NO: 29913 - DNA, 17 bp, synthetic construct
  source 1..17: mol_type = other DNA
ctcctttgtccatctca

SEQ ID NO: 29914 - DNA, 17 bp, synthetic construct
  source 1..17: mol_type = other DNA
gctcctttgtccatctc

SEQ ID NO: 29915 - DNA, 17 bp, synthetic construct
  source 1..17: mol_type = other DNA
ggctcctttgtccatct

SEQ ID NO: 29916 - DNA, 17 bp, synthetic construct
  source 1..17: mol_type = other DNA
gggctcctttgtccatc

SEQ ID NO: 29917 - DNA, 17 bp, synthetic construct
  source 1..17: mol_type = other DNA
agggctcctttgtccat

SEQ ID NO: 29918 - DNA, 17 bp, synthetic construct
  source 1..17: mol_type = other DNA
aagggctcctttgtcca

SEQ ID NO: 29919 - DNA, 17 bp, synthetic construct
  source 1..17: mol_type = other DNA
caagggctcctttgtcc

SEQ ID NO: 29920 - DNA, 17 bp, synthetic construct
  source 1..17: mol_type = other DNA
acaagggctcctttgtc

SEQ ID NO: 29921 - DNA, 17 bp, synthetic construct
  source 1..17: mol_type = other DNA
aacaagggctcctttgt

SEQ ID NO: 29922 - DNA, 17 bp, synthetic construct
  source 1..17: mol_type = other DNA
taacaagggctcctttg

SEQ ID NO: 29923 - DNA, 17 bp, synthetic construct
  source 1..17: mol_type = other DNA
gtaacaagggctccttt

SEQ ID NO: 29924 - DNA, 17 bp, synthetic construct
  source 1..17: mol_type = other DNA
agtaacaagggctcctt

SEQ ID NO: 29925 - DNA, 17 bp, synthetic construct
  source 1..17: mol_type = other DNA
cagtaacaagggctcct

SEQ ID NO: 29926 - DNA, 17 bp, synthetic construct
  source 1..17: mol_type = other DNA
gcagtaacaagggctcc

SEQ ID NO: 29927 - DNA, 17 bp, synthetic construct
  source 1..17: mol_type = other DNA
tgcagtaacaagggctc

SEQ ID NO: 29928 - DNA, 17 bp, synthetic construct
  source 1..17: mol_type = other DNA
gtgcagtaacaagggct

SEQ ID NO: 29929 - DNA, 17 bp, synthetic construct
  source 1..17: mol_type = other DNA
cgtgcagtaacaagggc

SEQ ID NO: 29930 - DNA, 17 bp, synthetic construct
  source 1..17: mol_type = other DNA
acgtgcagtaacaaggg

SEQ ID NO: 29931 - DNA, 17 bp, synthetic construct
  source 1..17: mol_type = other DNA
gcaaggtgaagtttgga

SEQ ID NO: 29932 - DNA, 17 bp, synthetic construct
  source 1..17: mol_type = other DNA
tgcaaggtgaagtttgg

SEQ ID NO: 29933 - DNA, 17 bp, synthetic construct
  source 1..17: mol_type = other DNA
gtgcaaggtgaagtttg

SEQ ID NO: 29934 - DNA, 17 bp, synthetic construct
  source 1..17: mol_type = other DNA
tgtgcaaggtgaagttt

SEQ ID NO: 29935 - DNA, 17 bp, synthetic construct
  source 1..17: mol_type = other DNA
gtgtgcaaggtgaagtt

SEQ ID NO: 29936 - DNA, 17 bp, synthetic construct
  source 1..17: mol_type = other DNA
tgtgtgcaaggtgaagt

SEQ ID NO: 29937 - DNA, 17 bp, synthetic construct
  source 1..17: mol_type = other DNA
ctgtgtgcaaggtgaag

SEQ ID NO: 29938 - DNA, 17 bp, synthetic construct
  source 1..17: mol_type = other DNA
actgtgtgcaaggtgaa

SEQ ID NO: 29939 - DNA, 17 bp, synthetic construct
  source 1..17: mol_type = other DNA
tactgtgtgcaaggtga

SEQ ID NO: 29940 - DNA, 17 bp, synthetic construct
  source 1..17: mol_type = other DNA
ttgtgcattgtctgtta

SEQ ID NO: 29941 - DNA, 17 bp, synthetic construct
  source 1..17: mol_type = other DNA
tttgtgcattgtctgtt

SEQ ID NO: 29942 - DNA, 17 bp, synthetic construct
  source 1..17: mol_type = other DNA
atttgtgcattgtctgt

SEQ ID NO: 29943 - DNA, 17 bp, synthetic construct
  source 1..17: mol_type = other DNA
gatttgtgcattgtctg

SEQ ID NO: 29944 - DNA, 17 bp, synthetic construct
  source 1..17: mol_type = other DNA
ggatttgtgcattgtct

SEQ ID NO: 29945 - DNA, 17 bp, synthetic construct
  source 1..17: mol_type = other DNA
tggatttgtgcattgtc

SEQ ID NO: 29946 - DNA, 17 bp, synthetic construct
  source 1..17: mol_type = other DNA
gtggatttgtgcattgt

SEQ ID NO: 29947 - DNA, 17 bp, synthetic construct
  source 1..17: mol_type = other DNA
agtggatttgtgcattg

SEQ ID NO: 29948 - DNA, 17 bp, synthetic construct
  source 1..17: mol_type = other DNA
aagtggatttgtgcatt

SEQ ID NO: 29949 - DNA, 17 bp, synthetic construct
  source 1..17: mol_type = other DNA
gaagtggatttgtgcat

SEQ ID NO: 29950 - DNA, 17 bp, synthetic construct
  source 1..17: mol_type = other DNA
ggaagtggatttgtgca

SEQ ID NO: 29951 - DNA, 17 bp, synthetic construct
  source 1..17: mol_type = other DNA
aggaagtggatttgtgc

SEQ ID NO: 29952 - DNA, 17 bp, synthetic construct
  source 1..17: mol_type = other DNA
gtccataaggaagtgga

SEQ ID NO: 29953 - DNA, 17 bp, synthetic construct
  source 1..17: mol_type = other DNA
cgtccataaggaagtgg

SEQ ID NO: 29954 - DNA, 17 bp, synthetic construct
  source 1..17: mol_type = other DNA
ccgtccataaggaagtg

SEQ ID NO: 29955 - DNA, 17 bp, synthetic construct
  source 1..17: mol_type = other DNA
tccgtccataaggaagt

SEQ ID NO: 29956 - DNA, 17 bp, synthetic construct
  source 1..17: mol_type = other DNA
ttccgtccataaggaag

SEQ ID NO: 29957 - DNA, 17 bp, synthetic construct
  source 1..17: mol_type = other DNA
tttccgtccataaggaa

SEQ ID NO: 29958 - DNA, 17 bp, synthetic construct
  source 1..17: mol_type = other DNA
atttccgtccataagga

SEQ ID NO: 29959 - DNA, 17 bp, synthetic construct
  source 1..17: mol_type = other DNA
aatttccgtccataagg

SEQ ID NO: 29960 - DNA, 17 bp, synthetic construct
  source 1..17: mol_type = other DNA
cagaatttccgtccata

SEQ ID NO: 29961 - DNA, 17 bp, synthetic construct
  source 1..17: mol_type = other DNA
tcagaatttccgtccat

SEQ ID NO: 29962 - DNA, 17 bp, synthetic construct
  source 1..17: mol_type = other DNA
ttcagaatttccgtcca

SEQ ID NO: 29963 - DNA, 17 bp, synthetic construct
  source 1..17: mol_type = other DNA
tttcagaatttccgtcc

SEQ ID NO: 29964 - DNA, 17 bp, synthetic construct
  source 1..17: mol_type = other DNA
gccaggcataaaaggat

SEQ ID NO: 29965 - DNA, 17 bp, synthetic construct
  source 1..17: mol_type = other DNA
ggccaggcataaaagga

SEQ ID NO: 29966 - DNA, 17 bp, synthetic construct
  source 1..17: mol_type = other DNA
aggccaggcataaaagg

SEQ ID NO: 29967 - DNA, 17 bp, synthetic construct
  source 1..17: mol_type = other DNA
gaaaggccaggcataaa

SEQ ID NO: 29968 - DNA, 17 bp, synthetic construct
  source 1..17: mol_type = other DNA
ggaaaggccaggcataa

SEQ ID NO: 29969 - DNA, 17 bp, synthetic construct
  source 1..17: mol_type = other DNA
tggaaaggccaggcata

SEQ ID NO: 29970 - DNA, 17 bp, synthetic construct
  source 1..17: mol_type = other DNA
atggaaaggccaggcat

SEQ ID NO: 29971 - DNA, 17 bp, synthetic construct
  source 1..17: mol_type = other DNA
gatggaaaggccaggca

SEQ ID NO: 29972 - DNA, 17 bp, synthetic construct
  source 1..17: mol_type = other DNA
ggatggaaaggccaggc

SEQ ID NO: 29973 - DNA, 17 bp, synthetic construct
  source 1..17: mol_type = other DNA
aggatggaaaggccagg

SEQ ID NO: 29974 - DNA, 17 bp, synthetic construct
  source 1..17: mol_type = other DNA
aaggatggaaaggccag

SEQ ID NO: 29975 - DNA, 17 bp, synthetic construct
  source 1..17: mol_type = other DNA
gaaggatggaaaggcca

SEQ ID NO: 29976 - DNA, 17 bp, synthetic construct
  source 1..17: mol_type = other DNA
tgaaggatggaaaggcc

SEQ ID NO: 29977 - DNA, 17 bp, synthetic construct
  source 1..17: mol_type = other DNA
gggaagttgaaggatgg

SEQ ID NO: 29978 - DNA, 17 bp, synthetic construct
  source 1..17: mol_type = other DNA
ggggaagttgaaggatg

SEQ ID NO: 29979 - DNA, 17 bp, synthetic construct
  source 1..17: mol_type = other DNA
aggggaagttgaaggat

SEQ ID NO: 29980 - DNA, 17 bp, synthetic construct
  source 1..17: mol_type = other DNA
gggaaaggggaagttga

SEQ ID NO: 29981 - DNA, 17 bp, synthetic construct
  source 1..17: mol_type = other DNA
tgggaaaggggaagttg

SEQ ID NO: 29982 - DNA, 17 bp, synthetic construct
  source 1..17: mol_type = other DNA
catgggaaaggggaagt

SEQ ID NO: 29983 - DNA, 17 bp, synthetic construct
  source 1..17: mol_type = other DNA
gcatgggaaaggggaag

SEQ ID NO: 29984 - DNA, 17 bp, synthetic construct
  source 1..17: mol_type = other DNA
agcatgggaaaggggaa

SEQ ID NO: 29985 - DNA, 17 bp, synthetic construct
  source 1..17: mol_type = other DNA
cagcatgggaaagggga

SEQ ID NO: 29986 - DNA, 17 bp, synthetic construct
  source 1..17: mol_type = other DNA
acagcatgggaaagggg

SEQ ID NO: 29987 - DNA, 17 bp, synthetic construct
  source 1..17: mol_type = other DNA
cacagcatgggaaaggg

SEQ ID NO: 29988 - DNA, 17 bp, synthetic construct
  source 1..17: mol_type = other DNA
tcacagcatgggaaagg

SEQ ID NO: 29989 - DNA, 17 bp, synthetic construct
  source 1..17: mol_type = other DNA
cattcacagcatgggaa

SEQ ID NO: 29990 - DNA, 17 bp, synthetic construct
  source 1..17: mol_type = other DNA
tcattcacagcatggga

SEQ ID NO: 29991 - DNA, 17 bp, synthetic construct
  source 1..17: mol_type = other DNA
atcattcacagcatggg

SEQ ID NO: 29992 - DNA, 17 bp, synthetic construct
  source 1..17: mol_type = other DNA
cctgtcactgagattaa

SEQ ID NO: 29993 - DNA, 17 bp, synthetic construct
  source 1..17: mol_type = other DNA
ccctgtcactgagatta

SEQ ID NO: 29994 - DNA, 17 bp, synthetic construct
  source 1..17: mol_type = other DNA
cccctgtcactgagatt

SEQ ID NO: 29995 - DNA, 17 bp, synthetic construct
  source 1..17: mol_type = other DNA
tcccctgtcactgagat

SEQ ID NO: 29996 - DNA, 17 bp, synthetic construct
  source 1..17: mol_type = other DNA
ttcccctgtcactgaga

SEQ ID NO: 29997 - DNA, 17 bp, synthetic construct
  source 1..17: mol_type = other DNA
gttcccctgtcactgag

SEQ ID NO: 29998 - DNA, 17 bp, synthetic construct
  source 1..17: mol_type = other DNA
tgttcccctgtcactga

SEQ ID NO: 29999 - DNA, 17 bp, synthetic construct
  source 1..17: mol_type = other DNA
gtgttcccctgtcactg

SEQ ID NO: 30000 - DNA, 17 bp, synthetic construct
  source 1..17: mol_type = other DNA
tgtgttcccctgtcact

SEQ ID NO: 30001 - DNA, 17 bp, synthetic construct
  source 1..17: mol_type = other DNA
ctgtgttcccctgtcac

SEQ ID NO: 30002 - DNA, 17 bp, synthetic construct
  source 1..17: mol_type = other DNA
tacctgtgttcccctgt

SEQ ID NO: 30003 - DNA, 17 bp, synthetic construct
  source 1..17: mol_type = other DNA
ctacctgtgttcccctg

SEQ ID NO: 30004 - DNA, 17 bp, synthetic construct
  source 1..17: mol_type = other DNA
gagctacctgtgttccc

SEQ ID NO: 30005 - DNA, 17 bp, synthetic construct
  source 1..17: mol_type = other DNA
agagctacctgtgttcc

SEQ ID NO: 30006 - DNA, 17 bp, synthetic construct
  source 1..17: mol_type = other DNA
tagagctacctgtgttc

SEQ ID NO: 30007 - DNA, 17 bp, synthetic construct
  source 1..17: mol_type = other DNA
ttagagctacctgtgtt

SEQ ID NO: 30008 - DNA, 17 bp, synthetic construct
  source 1..17: mol_type = other DNA
attagagctacctgtgt

SEQ ID NO: 30009 - DNA, 17 bp, synthetic construct
  source 1..17: mol_type = other DNA
tattagagctacctgtg

SEQ ID NO: 30010 - DNA, 17 bp, synthetic construct
  source 1..17: mol_type = other DNA
atattagagctacctgt

SEQ ID NO: 30011 - DNA, 17 bp, synthetic construct
  source 1..17: mol_type = other DNA
ctatattagagctacct

SEQ ID NO: 30012 - DNA, 17 bp, synthetic construct
  source 1..17: mol_type = other DNA
gctatattagagctacc

SEQ ID NO: 30013 - DNA, 17 bp, synthetic construct
  source 1..17: mol_type = other DNA
acagctatattagagct

SEQ ID NO: 30014 - DNA, 17 bp, synthetic construct
  source 1..17: mol_type = other DNA
tcagtcacagctatatt

SEQ ID NO: 30015 - DNA, 17 bp, synthetic construct
  source 1..17: mol_type = other DNA
ctcagtcacagctatat

SEQ ID NO: 30016 - DNA, 17 bp, synthetic construct
  source 1..17: mol_type = other DNA
tctcagtcacagctata

SEQ ID NO: 30017 - DNA, 17 bp, synthetic construct
  source 1..17: mol_type = other DNA
cctagaatgcagtggaa

SEQ ID NO: 30018 - DNA, 17 bp, synthetic construct
  source 1..17: mol_type = other DNA
tcctagaatgcagtgga

SEQ ID NO: 30019 - DNA, 17 bp, synthetic construct
  source 1..17: mol_type = other DNA
ttcctagaatgcagtgg

SEQ ID NO: 30020 - DNA, 17 bp, synthetic construct
  source 1..17: mol_type = other DNA
gttcctagaatgcagtg

SEQ ID NO: 30021 - DNA, 17 bp, synthetic construct
  source 1..17: mol_type = other DNA
tgttcctagaatgcagt

SEQ ID NO: 30022 - DNA, 17 bp, synthetic construct
  source 1..17: mol_type = other DNA
ctgttcctagaatgcag

SEQ ID NO: 30023 - DNA, 17 bp, synthetic construct
  source 1..17: mol_type = other DNA
actgttcctagaatgca

SEQ ID NO: 30024 - DNA, 17 bp, synthetic construct
  source 1..17: mol_type = other DNA
tactgttcctagaatgc

SEQ ID NO: 30025 - DNA, 17 bp, synthetic construct
  source 1..17: mol_type = other DNA
tcttactgttcctagaa

SEQ ID NO: 30026 - DNA, 17 bp, synthetic construct
  source 1..17: mol_type = other DNA
ctcttactgttcctaga

SEQ ID NO: 30027 - DNA, 17 bp, synthetic construct
  source 1..17: mol_type = other DNA
cctcttactgttcctag

SEQ ID NO: 30028 - DNA, 17 bp, synthetic construct
  source 1..17: mol_type = other DNA
tcctcttactgttccta

SEQ ID NO: 30029 - DNA, 17 bp, synthetic construct
  source 1..17: mol_type = other DNA
gtcctcttactgttcct

SEQ ID NO: 30030 - DNA, 17 bp, synthetic construct
  source 1..17: mol_type = other DNA
ggtcctcttactgttcc

SEQ ID NO: 30031 - DNA, 17 bp, synthetic construct
  source 1..17: mol_type = other DNA
aggtcctcttactgttc

SEQ ID NO: 30032 - DNA, 17 bp, synthetic construct
  source 1..17: mol_type = other DNA
aaggtcctcttactgtt

SEQ ID NO: 30033 - DNA, 17 bp, synthetic construct
  source 1..17: mol_type = other DNA
caaggtcctcttactgt

SEQ ID NO: 30034 - DNA, 17 bp, synthetic construct
  source 1..17: mol_type = other DNA
acaaggtcctcttactg

SEQ ID NO: 30035 - DNA, 17 bp, synthetic construct
  source 1..17: mol_type = other DNA
cacaaggtcctcttact

SEQ ID NO: 30036 - DNA, 17 bp, synthetic construct
  source 1..17: mol_type = other DNA
tcacaaggtcctcttac

SEQ ID NO: 30037 - DNA, 17 bp, synthetic construct
  source 1..17: mol_type = other DNA
ctcacaaggtcctctta

SEQ ID NO: 30038 - DNA, 17 bp, synthetic construct
  source 1..17: mol_type = other DNA
actcacaaggtcctctt

SEQ ID NO: 30039 - DNA, 17 bp, synthetic construct
  source 1..17: mol_type = other DNA
cactcacaaggtcctct

SEQ ID NO: 30040 - DNA, 17 bp, synthetic construct
  source 1..17: mol_type = other DNA
tcactcacaaggtcctc

SEQ ID NO: 30041 - DNA, 17 bp, synthetic construct
  source 1..17: mol_type = other DNA
ttcactcacaaggtcct

SEQ ID NO: 30042 - DNA, 17 bp, synthetic construct
  source 1..17: mol_type = other DNA
attcactcacaaggtcc

SEQ ID NO: 30043 - DNA, 17 bp, synthetic construct
  source 1..17: mol_type = other DNA
tattcactcacaaggtc

SEQ ID NO: 30044 - DNA, 17 bp, synthetic construct
  source 1..17: mol_type = other DNA
ccactctgtaatgtgga

SEQ ID NO: 30045 - DNA, 17 bp, synthetic construct
  source 1..17: mol_type = other DNA
cccactctgtaatgtgg

SEQ ID NO: 30046 - DNA, 17 bp, synthetic construct
  source 1..17: mol_type = other DNA
acccactctgtaatgtg

SEQ ID NO: 30047 - DNA, 17 bp, synthetic construct
  source 1..17: mol_type = other DNA
tacccactctgtaatgt

SEQ ID NO: 30048 - DNA, 17 bp, synthetic construct
  source 1..17: mol_type = other DNA
ttacccactctgtaatg

SEQ ID NO: 30049 - DNA, 17 bp, synthetic construct
  source 1..17: mol_type = other DNA
attacccactctgtaat

SEQ ID NO: 30050 - DNA, 17 bp, synthetic construct
  source 1..17: mol_type = other DNA
tattacccactctgtaa

SEQ ID NO: 30051 - DNA, 17 bp, synthetic construct
  source 1..17: mol_type = other DNA
ttattacccactctgta

SEQ ID NO: 30052 - DNA, 17 bp, synthetic construct
  source 1..17: mol_type = other DNA
cttattacccactctgt

SEQ ID NO: 30053 - DNA, 17 bp, synthetic construct
  source 1..17: mol_type = other DNA
gcttattacccactctg

SEQ ID NO: 30054 - DNA, 17 bp, synthetic construct
  source 1..17: mol_type = other DNA
tgcttattacccactct

SEQ ID NO: 30055 - DNA, 17 bp, synthetic construct
  source 1..17: mol_type = other DNA
ctgcttattacccactc

SEQ ID NO: 30056 - DNA, 17 bp, synthetic construct
  source 1..17: mol_type = other DNA
tctgcttattacccact

SEQ ID NO: 30057 - DNA, 17 bp, synthetic construct
  source 1..17: mol_type = other DNA
atctgcttattacccac

SEQ ID NO: 30058 - DNA, 17 bp, synthetic construct
  source 1..17: mol_type = other DNA
aatctgcttattaccca

SEQ ID NO: 30059 - DNA, 17 bp, synthetic construct
  source 1..17: mol_type = other DNA
taatctgcttattaccc

SEQ ID NO: 30060 - DNA, 18 bp, synthetic construct
  source 1..18: mol_type = other DNA
gacgcgggcagagagagg

SEQ ID NO: 30061 - DNA, 18 bp, synthetic construct
  source 1..18: mol_type = other DNA
ggacgcgggcagagagag

SEQ ID NO: 30062 - DNA, 18 bp, synthetic construct
  source 1..18: mol_type = other DNA
cggacgcgggcagagaga

SEQ ID NO: 30063 - DNA, 18 bp, synthetic construct
  source 1..18: mol_type = other DNA
acggacgcgggcagagag

SEQ ID NO: 30064 - DNA, 18 bp, synthetic construct
  source 1..18: mol_type = other DNA
gacggacgcgggcagaga

SEQ ID NO: 30065 - DNA, 18 bp, synthetic construct
  source 1..18: mol_type = other DNA
ggacggacgcgggcagag

SEQ ID NO: 30066 - DNA, 18 bp, synthetic construct
  source 1..18: mol_type = other DNA
cggacggacgcgggcaga

SEQ ID NO: 30067 - DNA, 18 bp, synthetic construct
  source 1..18: mol_type = other DNA
acggacggacgcgggcag

SEQ ID NO: 30068 - DNA, 18 bp, synthetic construct
  source 1..18: mol_type = other DNA
cacggacggacgcgggca

SEQ ID NO: 30069 - DNA, 18 bp, synthetic construct
  source 1..18: mol_type = other DNA
tcacggacggacgcgggc

SEQ ID NO: 30070 - DNA, 18 bp, synthetic construct
  source 1..18: mol_type = other DNA
ttcacggacggacgcggg

SEQ ID NO: 30071 - DNA, 18 bp, synthetic construct
  source 1..18: mol_type = other DNA
tttcacggacggacgcgg

SEQ ID NO: 30072 - DNA, 18 bp, synthetic construct
  source 1..18: mol_type = other DNA
atttcacggacggacgcg

SEQ ID NO: 30073 - DNA, 18 bp, synthetic construct
  source 1..18: mol_type = other DNA
aatttcacggacggacgc

SEQ ID NO: 30074 - DNA, 18 bp, synthetic construct
  source 1..18: mol_type = other DNA
gaatttcacggacggacg

SEQ ID NO: 30075 - DNA, 18 bp, synthetic construct
  source 1..18: mol_type = other DNA
ggaatttcacggacggac

SEQ ID NO: 30076 - DNA, 18 bp, synthetic construct
  source 1..18: mol_type = other DNA
cggaatttcacggacgga

SEQ ID NO: 30077 - DNA, 18 bp, synthetic construct
  source 1..18: mol_type = other DNA
ccggaatttcacggacgg

SEQ ID NO: 30078 - DNA, 18 bp, synthetic construct
  source 1..18: mol_type = other DNA
gccggaatttcacggacg

SEQ ID NO: 30079 - DNA, 18 bp, synthetic construct
  source 1..18: mol_type = other DNA
ggccggaatttcacggac

SEQ ID NO: 30080 - DNA, 18 bp, synthetic construct
  source 1..18: mol_type = other DNA
cggccggaatttcacgga

SEQ ID NO: 30081 - DNA, 18 bp, synthetic construct
  source 1..18: mol_type = other DNA
ccggccggaatttcacgg

SEQ ID NO: 30082 - DNA, 18 bp, synthetic construct
  source 1..18: mol_type = other DNA
cccggccggaatttcacg

SEQ ID NO: 30083 - DNA, 18 bp, synthetic construct
  source 1..18: mol_type = other DNA
ccccggccggaatttcac

SEQ ID NO: 30084 - DNA, 18 bp, synthetic construct
  source 1..18: mol_type = other DNA
agccccggccggaatttc

SEQ ID NO: 30085 - DNA, 18 bp, synthetic construct
  source 1..18: mol_type = other DNA
gagccccggccggaattt

SEQ ID NO: 30086 - DNA, 18 bp, synthetic construct
  source 1..18: mol_type = other DNA
tgagccccggccggaatt

SEQ ID NO: 30087 - DNA, 18 bp, synthetic construct
  source 1..18: mol_type = other DNA
gagggccatcgcggtgag

SEQ ID NO: 30088 - DNA, 18 bp, synthetic construct
  source 1..18: mol_type = other DNA
tccgagggtgtcgggagg

SEQ ID NO: 30089 - DNA, 18 bp, synthetic construct
  source 1..18: mol_type = other DNA
gtccgagggtgtcgggag

SEQ ID NO: 30090 - DNA, 18 bp, synthetic construct
  source 1..18: mol_type = other DNA
tgtccgagggtgtcggga

SEQ ID NO: 30091 - DNA, 18 bp, synthetic construct
  source 1..18: mol_type = other DNA
ctgtccgagggtgtcggg

SEQ ID NO: 30092 - DNA, 18 bp, synthetic construct
  source 1..18: mol_type = other DNA
tgctgtccgagggtgtcg

SEQ ID NO: 30093 - DNA, 18 bp, synthetic construct
  source 1..18: mol_type = other DNA
acgagtctccgtcgccgt

SEQ ID NO: 30094 - DNA, 18 bp, synthetic construct
  source 1..18: mol_type = other DNA
aacgagtctccgtcgccg

SEQ ID NO: 30095 - DNA, 18 bp, synthetic construct
  source 1..18: mol_type = other DNA
aaacgagtctccgtcgcc

SEQ ID NO: 30096 - DNA, 18 bp, synthetic construct
  source 1..18: mol_type = other DNA
caaacgagtctccgtcgc

SEQ ID NO: 30097 - DNA, 18 bp, synthetic construct
  source 1..18: mol_type = other DNA
ccaaacgagtctccgtcg

SEQ ID NO: 30098 - DNA, 18 bp, synthetic construct
  source 1..18: mol_type = other DNA
tccaaacgagtctccgtc

SEQ ID NO: 30099 - DNA, 18 bp, synthetic construct
  source 1..18: mol_type = other DNA
aaagcaggctcgcagggc

SEQ ID NO: 30100 - DNA, 18 bp, synthetic construct
  source 1..18: mol_type = other DNA
caaagcaggctcgcaggg

SEQ ID NO: 30101 - DNA, 18 bp, synthetic construct
  source 1..18: mol_type = other DNA
tcaaagcaggctcgcagg

SEQ ID NO: 30102 - DNA, 18 bp, synthetic construct
  source 1..18: mol_type = other DNA
ctcaaagcaggctcgcag

SEQ ID NO: 30103 - DNA, 18 bp, synthetic construct
  source 1..18: mol_type = other DNA
gctcaaagcaggctcgca

SEQ ID NO: 30104 - DNA, 18 bp, synthetic construct
  source 1..18: mol_type = other DNA
cgctcaaagcaggctcgc

SEQ ID NO: 30105 - DNA, 18 bp, synthetic construct
  source 1..18: mol_type = other DNA
ccgctcaaagcaggctcg

SEQ ID NO: 30106 - DNA, 18 bp, synthetic construct
  source 1..18: mol_type = other DNA
tccgctcaaagcaggctc

SEQ ID NO: 30107 - DNA, 18 bp, synthetic construct
  source 1..18: mol_type = other DNA
ttccgctcaaagcaggct

SEQ ID NO: 30108 - DNA, 18 bp, synthetic construct
  source 1..18: mol_type = other DNA
gttccgctcaaagcaggc

SEQ ID NO: 30109 - DNA, 18 bp, synthetic construct
  source 1..18: mol_type = other DNA
ggttccgctcaaagcagg

SEQ ID NO: 30110 - DNA, 18 bp, synthetic construct
  source 1..18: mol_type = other DNA
gggttccgctcaaagcag

SEQ ID NO: 30111 - DNA, 18 bp, synthetic construct
  source 1..18: mol_type = other DNA
cgggttccgctcaaagca

SEQ ID NO: 30112 - DNA, 18 bp, synthetic construct
  source 1..18: mol_type = other DNA
acgggttccgctcaaagc

SEQ ID NO: 30113 - DNA, 18 bp, synthetic construct
  source 1..18: mol_type = other DNA
tacgggttccgctcaaag

SEQ ID NO: 30114 - DNA, 18 bp, synthetic construct
  source 1..18: mol_type = other DNA
gtacgggttccgctcaaa

SEQ ID NO: 30115 - DNA, 18 bp, synthetic construct
  source 1..18: mol_type = other DNA
ggtacgggttccgctcaa

SEQ ID NO: 30116 - DNA, 18 bp, synthetic construct
  source 1..18: mol_type = other DNA
cgggtacgggttccgctc

SEQ ID NO: 30117 - DNA, 18 bp, synthetic construct
  source 1..18: mol_type = other DNA
atgcccgggtacgggttc

SEQ ID NO: 30118 - DNA, 18 bp, synthetic construct
  source 1..18: mol_type = other DNA
gatgcccgggtacgggtt

SEQ ID NO: 30119 - DNA, 18 bp, synthetic construct
  source 1..18: mol_type = other DNA
cgatgcccgggtacgggt

SEQ ID NO: 30120 - DNA, 18 bp, synthetic construct
  source 1..18: mol_type = other DNA
tggcgatgcccgggtacg

SEQ ID NO: 30121 - DNA, 18 bp, synthetic construct
  source 1..18: mol_type = other DNA
aatgccgatggcctgggc

SEQ ID NO: 30122 - DNA, 18 bp, synthetic construct
  source 1..18: mol_type = other DNA
gaatgccgatggcctggg

SEQ ID NO: 30123 - DNA, 18 bp, synthetic construct
  source 1..18: mol_type = other DNA
ggaatgccgatggcctgg

SEQ ID NO: 30124 - DNA, 18 bp, synthetic construct
  source 1..18: mol_type = other DNA
aatctggaccctgggctc

SEQ ID NO: 30125 - DNA, 18 bp, synthetic construct
  source 1..18: mol_type = other DNA
aaatctggaccctgggct

SEQ ID NO: 30126 - DNA, 18 bp, synthetic construct
  source 1..18: mol_type = other DNA
caaatctggaccctgggc

SEQ ID NO: 30127 - DNA, 18 bp, synthetic construct
  source 1..18: mol_type = other DNA
ccaaatctggaccctggg

SEQ ID NO: 30128 - DNA, 18 bp, synthetic construct
  source 1..18: mol_type = other DNA
accaaatctggaccctgg

SEQ ID NO: 30129 - DNA, 18 bp, synthetic construct
  source 1..18: mol_type = other DNA
aaccaaatctggaccctg

SEQ ID NO: 30130 - DNA, 18 bp, synthetic construct
  source 1..18: mol_type = other DNA
aaaccaaatctggaccct

SEQ ID NO: 30131 - DNA, 18 bp, synthetic construct
  source 1..18: mol_type = other DNA
gaaaccaaatctggaccc

SEQ ID NO: 30132 - DNA, 18 bp, synthetic construct
  source 1..18: mol_type = other DNA
ctctcattctgaaaccaa

SEQ ID NO: 30133 - DNA, 18 bp, synthetic construct
  source 1..18: mol_type = other DNA
cctctcattctgaaacca

SEQ ID NO: 30134 - DNA, 18 bp, synthetic construct
  source 1..18: mol_type = other DNA
acctctcattctgaaacc

SEQ ID NO: 30135 - DNA, 18 bp, synthetic construct
  source 1..18: mol_type = other DNA
gacctctcattctgaaac

SEQ ID NO: 30136 - DNA, 18 bp, synthetic construct
  source 1..18: mol_type = other DNA
tgacctctcattctgaaa

SEQ ID NO: 30137 - DNA, 18 bp, synthetic construct
  source 1..18: mol_type = other DNA
gtgacctctcattctgaa

SEQ ID NO: 30138 - DNA, 18 bp, synthetic construct
  source 1..18: mol_type = other DNA
cgtgacctctcattctga

SEQ ID NO: 30139 - DNA, 18 bp, synthetic construct
  source 1..18: mol_type = other DNA
gcgtgacctctcattctg

SEQ ID NO: 30140 - DNA, 18 bp, synthetic construct
  source 1..18: mol_type = other DNA
ggcgtgacctctcattct

SEQ ID NO: 30141 - DNA, 18 bp, synthetic construct
  source 1..18: mol_type = other DNA
tggcgtgacctctcattc

SEQ ID NO: 30142 - DNA, 18 bp, synthetic construct
  source 1..18: mol_type = other DNA
ctggcgtgacctctcatt

SEQ ID NO: 30143 - DNA, 18 bp, synthetic construct
  source 1..18: mol_type = other DNA
gctggcgtgacctctcat

SEQ ID NO: 30144 - DNA, 18 bp, synthetic construct
  source 1..18: mol_type = other DNA
agctggcgtgacctctca

SEQ ID NO: 30145 - DNA, 18 bp, synthetic construct
  source 1..18: mol_type = other DNA
cagctggcgtgacctctc

SEQ ID NO: 30146 - DNA, 18 bp, synthetic construct
  source 1..18: mol_type = other DNA
tcagctggcgtgacctct

SEQ ID NO: 30147 - DNA, 18 bp, synthetic construct
  source 1..18: mol_type = other DNA
ctcagctggcgtgacctc

SEQ ID NO: 30148 - DNA, 18 bp, synthetic construct
  source 1..18: mol_type = other DNA
atcctggactccgggagg

SEQ ID NO: 30149 - DNA, 18 bp, synthetic construct
  source 1..18: mol_type = other DNA
aatcctggactccgggag

SEQ ID NO: 30150 - DNA, 18 bp, synthetic construct
  source 1..18: mol_type = other DNA
gaatcctggactccggga

SEQ ID NO: 30151 - DNA, 18 bp, synthetic construct
  source 1..18: mol_type = other DNA
tgaatcctggactccggg

SEQ ID NO: 30152 - DNA, 18 bp, synthetic construct
  source 1..18: mol_type = other DNA
ctgaatcctggactccgg

SEQ ID NO: 30153 - DNA, 18 bp, synthetic construct
  source 1..18: mol_type = other DNA
tctgaatcctggactccg

SEQ ID NO: 30154 - DNA, 18 bp, synthetic construct
  source 1..18: mol_type = other DNA
atctgaatcctggactcc

SEQ ID NO: 30155 - DNA, 18 bp, synthetic construct
  source 1..18: mol_type = other DNA
gatctgaatcctggactc

SEQ ID NO: 30156 - DNA, 18 bp, synthetic construct
  source 1..18: mol_type = other DNA
agatctgaatcctggact

SEQ ID NO: 30157 - DNA, 18 bp, synthetic construct
  source 1..18: mol_type = other DNA
cagatctgaatcctggac

SEQ ID NO: 30158 - DNA, 18 bp, synthetic construct
  source 1..18: mol_type = other DNA
ccagatctgaatcctgga

SEQ ID NO: 30159 - DNA, 18 bp, synthetic construct
  source 1..18: mol_type = other DNA
accagatctgaatcctgg

SEQ ID NO: 30160 - DNA, 18 bp, synthetic construct
  source 1..18: mol_type = other DNA
aaccagatctgaatcctg

SEQ ID NO: 30161 - DNA, 18 bp, synthetic construct
  source 1..18: mol_type = other DNA
aaaccagatctgaatcct

SEQ ID NO: 30162 - DNA, 18 bp, synthetic construct
  source 1..18: mol_type = other DNA
gaaaccagatctgaatcc

SEQ ID NO: 30163 - DNA, 18 bp, synthetic construct
  source 1..18: mol_type = other DNA
ttctgaaaccagatctga

SEQ ID NO: 30164 - DNA, 18 bp, synthetic construct
  source 1..18: mol_type = other DNA
gattctgaaaccagatct

SEQ ID NO: 30165 - DNA, 18 bp, synthetic construct
  source 1..18: mol_type = other DNA
cttcgattctgaaaccag

SEQ ID NO: 30166 - DNA, 18 bp, synthetic construct
  source 1..18: mol_type = other DNA
ccttcgattctgaaacca

SEQ ID NO: 30167 - DNA, 18 bp, synthetic construct
  source 1..18: mol_type = other DNA
cccttcgattctgaaacc

SEQ ID NO: 30168 - DNA, 18 bp, synthetic construct
  source 1..18: mol_type = other DNA
gcccttcgattctgaaac

SEQ ID NO: 30169 - DNA, 18 bp, synthetic construct
  source 1..18: mol_type = other DNA
ggcccttcgattctgaaa

SEQ ID NO: 30170 - DNA, 18 bp, synthetic construct
  source 1..18: mol_type = other DNA
tggcccttcgattctgaa

SEQ ID NO: 30171 - DNA, 18 bp, synthetic construct
  source 1..18: mol_type = other DNA
ctggcccttcgattctga

SEQ ID NO: 30172 - DNA, 18 bp, synthetic construct
  source 1..18: mol_type = other DNA
cctggcccttcgattctg

SEQ ID NO: 30173 - DNA, 18 bp, synthetic construct
  source 1..18: mol_type = other DNA
ggatgccttgcatctgcc

SEQ ID NO: 30174 - DNA, 18 bp, synthetic construct
  source 1..18: mol_type = other DNA
gggatgccttgcatctgc

SEQ ID NO: 30175 - DNA, 18 bp, synthetic construct
  source 1..18: mol_type = other DNA
cgggatgccttgcatctg

SEQ ID NO: 30176 - DNA, 18 bp, synthetic construct
  source 1..18: mol_type = other DNA
ccgggatgccttgcatct

SEQ ID NO: 30177 - DNA, 18 bp, synthetic construct
  source 1..18: mol_type = other DNA
cgccgggatgccttgcat

SEQ ID NO: 30178 - DNA, 18 bp, synthetic construct
  source 1..18: mol_type = other DNA
tgggagggcgccgggatg

SEQ ID NO: 30179 - DNA, 18 bp, synthetic construct
  source 1..18: mol_type = other DNA
aggggtgcttccagcgag

SEQ ID NO: 30180 - DNA, 18 bp, synthetic construct
  source 1..18: mol_type = other DNA
tgaggggtgcttccagcg

SEQ ID NO: 30181 - DNA, 18 bp, synthetic construct
  source 1..18: mol_type = other DNA
ctcgctgaggggtgcttc

SEQ ID NO: 30182 - DNA, 18 bp, synthetic construct
  source 1..18: mol_type = other DNA
cttcctcgctgaggggtg

SEQ ID NO: 30183 - DNA, 18 bp, synthetic construct
  source 1..18: mol_type = other DNA
ttcttcctcgctgagggg

SEQ ID NO: 30184 - DNA, 18 bp, synthetic construct
  source 1..18: mol_type = other DNA
attcttcctcgctgaggg

SEQ ID NO: 30185 - DNA, 18 bp, synthetic construct
  source 1..18: mol_type = other DNA
tattcttcctcgctgagg

SEQ ID NO: 30186 - DNA, 18 bp, synthetic construct
  source 1..18: mol_type = other DNA
gtattcttcctcgctgag

SEQ ID NO: 30187 - DNA, 18 bp, synthetic construct
  source 1..18: mol_type = other DNA
ggtattcttcctcgctga

SEQ ID NO: 30188 - DNA, 18 bp, synthetic construct
  source 1..18: mol_type = other DNA
cggtattcttcctcgctg

SEQ ID NO: 30189 - DNA, 18 bp, synthetic construct
  source 1..18: mol_type = other DNA
ccggtattcttcctcgct

SEQ ID NO: 30190 - DNA, 18 bp, synthetic construct
  source 1..18: mol_type = other DNA
cccggtattcttcctcgc

SEQ ID NO: 30191 - DNA, 18 bp, synthetic construct
  source 1..18: mol_type = other DNA
gcccggtattcttcctcg

SEQ ID NO: 30192 - DNA, 18 bp, synthetic construct
  source 1..18: mol_type = other DNA
agcccggtattcttcctc

SEQ ID NO: 30193 - DNA, 18 bp, synthetic construct
  source 1..18: mol_type = other DNA
gagcccggtattcttcct

SEQ ID NO: 30194 - DNA, 18 bp, synthetic construct
  source 1..18: mol_type = other DNA
agagcccggtattcttcc

SEQ ID NO: 30195 - DNA, 18 bp, synthetic construct
  source 1..18: mol_type = other DNA
cagagcccggtattcttc

SEQ ID NO: 30196 - DNA, 18 bp, synthetic construct
  source 1..18: mol_type = other DNA
gcagagcccggtattctt

SEQ ID NO: 30197 - DNA, 18 bp, synthetic construct
  source 1..18: mol_type = other DNA
agcagagcccggtattct

SEQ ID NO: 30198 - DNA, 18 bp, synthetic construct
  source 1..18: mol_type = other DNA
cagcagagcccggtattc

SEQ ID NO: 30199 - DNA, 18 bp, synthetic construct
  source 1..18: mol_type = other DNA
ccagcagagcccggtatt

SEQ ID NO: 30200 - DNA, 18 bp, synthetic construct
  source 1..18: mol_type = other DNA
tccagcagagcccggtat

SEQ ID NO: 30201 - DNA, 18 bp, synthetic construct
  source 1..18: mol_type = other DNA
aagctcctccagcagagc

SEQ ID NO: 30202 - DNA, 18 bp, synthetic construct
  source 1..18: mol_type = other DNA
aaagctcctccagcagag

SEQ ID NO: 30203 - DNA, 18 bp, synthetic construct
  source 1..18: mol_type = other DNA
taaagctcctccagcaga

SEQ ID NO: 30204 - DNA, 18 bp, synthetic construct
  source 1..18: mol_type = other DNA
ctaaagctcctccagcag

SEQ ID NO: 30205 - DNA, 18 bp, synthetic construct
  source 1..18: mol_type = other DNA
cctaaagctcctccagca

SEQ ID NO: 30206 - DNA, 18 bp, synthetic construct
  source 1..18: mol_type = other DNA
tcctaaagctcctccagc

SEQ ID NO: 30207 - DNA, 18 bp, synthetic construct
  source 1..18: mol_type = other DNA
gtcctaaagctcctccag

SEQ ID NO: 30208 - DNA, 18 bp, synthetic construct
  source 1..18: mol_type = other DNA
cgtcctaaagctcctcca

SEQ ID NO: 30209 - DNA, 18 bp, synthetic construct
  source 1..18: mol_type = other DNA
gcgtcctaaagctcctcc

SEQ ID NO: 30210 - DNA, 18 bp, synthetic construct
  source 1..18: mol_type = other DNA
cgcgtcctaaagctcctc

SEQ ID NO: 30211 - DNA, 18 bp, synthetic construct
  source 1..18: mol_type = other DNA
ccgcgtcctaaagctcct

SEQ ID NO: 30212 - DNA, 18 bp, synthetic construct
  source 1..18: mol_type = other DNA
cccgcgtcctaaagctcc

SEQ ID NO: 30213 - DNA, 18 bp, synthetic construct
  source 1..18: mol_type = other DNA
ccccgcgtcctaaagctc

SEQ ID NO: 30214 - DNA, 18 bp, synthetic construct
  source 1..18: mol_type = other DNA
accccgcgtcctaaagct

SEQ ID NO: 30215 - DNA, 18 bp, synthetic construct
  source 1..18: mol_type = other DNA
aaccccgcgtcctaaagc

SEQ ID NO: 30216 - DNA, 18 bp, synthetic construct
  source 1..18: mol_type = other DNA
caaccccgcgtcctaaag

SEQ ID NO: 30217 - DNA, 18 bp, synthetic construct
  source 1..18: mol_type = other DNA
ccaaccccgcgtcctaaa

SEQ ID NO: 30218 - DNA, 18 bp, synthetic construct
  source 1..18: mol_type = other DNA
cccaaccccgcgtcctaa

SEQ ID NO: 30219 - DNA, 18 bp, synthetic construct
  source 1..18: mol_type = other DNA
aagagaggccaccgccct

SEQ ID NO: 30220 - DNA, 18 bp, synthetic construct
  source 1..18: mol_type = other DNA
aaagagaggccaccgccc

SEQ ID NO: 30221 - DNA, 18 bp, synthetic construct
  source 1..18: mol_type = other DNA
gaaagagaggccaccgcc

SEQ ID NO: 30222 - DNA, 18 bp, synthetic construct
  source 1..18: mol_type = other DNA
cgaaagagaggccaccgc

SEQ ID NO: 30223 - DNA, 18 bp, synthetic construct
  source 1..18: mol_type = other DNA
gcgaaagagaggccaccg

SEQ ID NO: 30224 - DNA, 18 bp, synthetic construct
  source 1..18: mol_type = other DNA
cgcgaaagagaggccacc

SEQ ID NO: 30225 - DNA, 18 bp, synthetic construct
  source 1..18: mol_type = other DNA
ccgcgaaagagaggccac

SEQ ID NO: 30226 - DNA, 18 bp, synthetic construct
  source 1..18: mol_type = other DNA
cccgcgaaagagaggcca

SEQ ID NO: 30227 - DNA, 18 bp, synthetic construct
  source 1..18: mol_type = other DNA
ccccgcgaaagagaggcc

SEQ ID NO: 30228 - DNA, 18 bp, synthetic construct
  source 1..18: mol_type = other DNA
tccccgcgaaagagaggc

SEQ ID NO: 30229 - DNA, 18 bp, synthetic construct
  source 1..18: mol_type = other DNA
ttccccgcgaaagagagg

SEQ ID NO: 30230 - DNA, 18 bp, synthetic construct
  source 1..18: mol_type = other DNA
gttccccgcgaaagagag

SEQ ID NO: 30231 - DNA, 18 bp, synthetic construct
  source 1..18: mol_type = other DNA
tgttccccgcgaaagaga

SEQ ID NO: 30232 - DNA, 18 bp, synthetic construct
  source 1..18: mol_type = other DNA
gtgttccccgcgaaagag

SEQ ID NO: 30233 - DNA, 18 bp, synthetic construct
  source 1..18: mol_type = other DNA
ggtgttccccgcgaaaga

SEQ ID NO: 30234 - DNA, 18 bp, synthetic construct
  source 1..18: mol_type = other DNA
aggtgttccccgcgaaag

SEQ ID NO: 30235 - DNA, 18 bp, synthetic construct
  source 1..18: mol_type = other DNA
caggtgttccccgcgaaa

SEQ ID NO: 30236 - DNA, 18 bp, synthetic construct
  source 1..18: mol_type = other DNA
ccaggtgttccccgcgaa

SEQ ID NO: 30237 - DNA, 18 bp, synthetic construct
  source 1..18: mol_type = other DNA
agacacgcccctccgtag

SEQ ID NO: 30238 - DNA, 18 bp, synthetic construct
  source 1..18: mol_type = other DNA
gagacacgcccctccgta

SEQ ID NO: 30239 - DNA, 18 bp, synthetic construct
  source 1..18: mol_type = other DNA
cggagacacgcccctccg

SEQ ID NO: 30240 - DNA, 18 bp, synthetic construct
  source 1..18: mol_type = other DNA
gaatcccaggccggtcag

SEQ ID NO: 30241 - DNA, 18 bp, synthetic construct
  source 1..18: mol_type = other DNA
aggaatcccaggccggtc

SEQ ID NO: 30242 - DNA, 18 bp, synthetic construct
  source 1..18: mol_type = other DNA
caggaatcccaggccggt

SEQ ID NO: 30243 - DNA, 18 bp, synthetic construct
  source 1..18: mol_type = other DNA
aaggcaggaatcccaggc

SEQ ID NO: 30244 - DNA, 18 bp, synthetic construct
  source 1..18: mol_type = other DNA
gaaggcaggaatcccagg

SEQ ID NO: 30245 - DNA, 18 bp, synthetic construct
  source 1..18: mol_type = other DNA
agaaggcaggaatcccag

SEQ ID NO: 30246 - DNA, 18 bp, synthetic construct
  source 1..18: mol_type = other DNA
tagaaggcaggaatccca

SEQ ID NO: 30247 - DNA, 18 bp, synthetic construct
  source 1..18: mol_type = other DNA
ctagaaggcaggaatccc

SEQ ID NO: 30248 - DNA, 18 bp, synthetic construct
  source 1..18: mol_type = other DNA
cctagaaggcaggaatcc

SEQ ID NO: 30249 - DNA, 18 bp, synthetic construct
  source 1..18: mol_type = other DNA
acctagaaggcaggaatc

SEQ ID NO: 30250 - DNA, 18 bp, synthetic construct
  source 1..18: mol_type = other DNA
gacctagaaggcaggaat

SEQ ID NO: 30251 - DNA, 18 bp, synthetic construct
  source 1..18: mol_type = other DNA
agacctagaaggcaggaa

SEQ ID NO: 30252 - DNA, 18 bp, synthetic construct
  source 1..18: mol_type = other DNA
gtggagtctctcaccggg

SEQ ID NO: 30253 - DNA, 18 bp, synthetic construct
  source 1..18: mol_type = other DNA
gggatgcccaggaaagaa

SEQ ID NO: 30254 - DNA, 18 bp, synthetic construct
  source 1..18: mol_type = other DNA
cgggatgcccaggaaaga

SEQ ID NO: 30255 - DNA, 18 bp, synthetic construct
  source 1..18: mol_type = other DNA
ccgggatgcccaggaaag

SEQ ID NO: 30256 - DNA, 18 bp, synthetic construct
  source 1..18: mol_type = other DNA
cccgggatgcccaggaaa

SEQ ID NO: 30257 - DNA, 18 bp, synthetic construct
  source 1..18: mol_type = other DNA
tctgggatccccgggatg

SEQ ID NO: 30258 - DNA, 18 bp, synthetic construct
  source 1..18: mol_type = other DNA
atgcttttgaccgccagg

SEQ ID NO: 30259 - DNA, 18 bp, synthetic construct
  source 1..18: mol_type = other DNA
tatgcttttgaccgccag

SEQ ID NO: 30260 - DNA, 18 bp, synthetic construct
  source 1..18: mol_type = other DNA
gtatgcttttgaccgcca

SEQ ID NO: 30261 - DNA, 18 bp, synthetic construct
  source 1..18: mol_type = other DNA
ggtatgcttttgaccgcc

SEQ ID NO: 30262 - DNA, 18 bp, synthetic construct
  source 1..18: mol_type = other DNA
aggtatgcttttgaccgc

SEQ ID NO: 30263 - DNA, 18 bp, synthetic construct
  source 1..18: mol_type = other DNA
gaggtatgcttttgaccg

SEQ ID NO: 30264 - DNA, 18 bp, synthetic construct
  source 1..18: mol_type = other DNA
agaggtatgcttttgacc

SEQ ID NO: 30265 - DNA, 18 bp, synthetic construct
  source 1..18: mol_type = other DNA
cagaggtatgcttttgac

SEQ ID NO: 30266 - DNA, 18 bp, synthetic construct
  source 1..18: mol_type = other DNA
acagaggtatgcttttga

SEQ ID NO: 30267 - DNA, 18 bp, synthetic construct
  source 1..18: mol_type = other DNA
gacagaggtatgcttttg

SEQ ID NO: 30268 - DNA, 18 bp, synthetic construct
  source 1..18: mol_type = other DNA
agacagaggtatgctttt

SEQ ID NO: 30269 - DNA, 18 bp, synthetic construct
  source 1..18: mol_type = other DNA
cagacagaggtatgcttt

SEQ ID NO: 30270 - DNA, 18 bp, synthetic construct
  source 1..18: mol_type = other DNA
acagacagaggtatgctt

SEQ ID NO: 30271 - DNA, 18 bp, synthetic construct
  source 1..18: mol_type = other DNA
gacagacagaggtatgct

SEQ ID NO: 30272 - DNA, 18 bp, synthetic construct
  source 1..18: mol_type = other DNA
agacagacagaggtatgc

SEQ ID NO: 30273 - DNA, 18 bp, synthetic construct
  source 1..18: mol_type = other DNA
gcaaagacagacagaggt

SEQ ID NO: 30274 - DNA, 18 bp, synthetic construct
  source 1..18: mol_type = other DNA
ggcaaagacagacagagg

SEQ ID NO: 30275 - DNA, 18 bp, synthetic construct
  source 1..18: mol_type = other DNA
gggcaaagacagacagag

SEQ ID NO: 30276 - DNA, 18 bp, synthetic construct
  source 1..18: mol_type = other DNA
cgggcaaagacagacaga

SEQ ID NO: 30277 - DNA, 18 bp, synthetic construct
  source 1..18: mol_type = other DNA
gcgggcaaagacagacag

SEQ ID NO: 30278 - DNA, 18 bp, synthetic construct
  source 1..18: mol_type = other DNA
agcgggcaaagacagaca

SEQ ID NO: 30279 - DNA, 18 bp, synthetic construct
  source 1..18: mol_type = other DNA
aagcgggcaaagacagac

SEQ ID NO: 30280 - DNA, 18 bp, synthetic construct
  source 1..18: mol_type = other DNA
gaagcgggcaaagacaga

SEQ ID NO: 30281 - DNA, 18 bp, synthetic construct
  source 1..18: mol_type = other DNA
ggaagcgggcaaagacag

SEQ ID NO: 30282 - DNA, 18 bp, synthetic construct
  source 1..18: mol_type = other DNA
aggaagcgggcaaagaca

SEQ ID NO: 30283 - DNA, 18 bp, synthetic construct
  source 1..18: mol_type = other DNA
caggaagcgggcaaagac

SEQ ID NO: 30284 - DNA, 18 bp, synthetic construct
  source 1..18: mol_type = other DNA
ccaggaagcgggcaaaga

SEQ ID NO: 30285 - DNA, 18 bp, synthetic construct
  source 1..18: mol_type = other DNA
gccaggaagcgggcaaag

SEQ ID NO: 30286 - DNA, 18 bp, synthetic construct
  source 1..18: mol_type = other DNA
agccaggaagcgggcaaa

SEQ ID NO: 30287 - DNA, 18 bp, synthetic construct
  source 1..18: mol_type = other DNA
tagccaggaagcgggcaa

SEQ ID NO: 30288 - DNA, 18 bp, synthetic construct
  source 1..18: mol_type = other DNA
ctagccaggaagcgggca

SEQ ID NO: 30289 - DNA, 18 bp, synthetic construct
  source 1..18: mol_type = other DNA
tctagccaggaagcgggc

SEQ ID NO: 30290 - DNA, 18 bp, synthetic construct
  source 1..18: mol_type = other DNA
gtctagccaggaagcggg

SEQ ID NO: 30291 - DNA, 18 bp, synthetic construct
  source 1..18: mol_type = other DNA
ggtctagccaggaagcgg

SEQ ID NO: 30292 - DNA, 18 bp, synthetic construct
  source 1..18: mol_type = other DNA
aggtctagccaggaagcg

SEQ ID NO: 30293 - DNA, 18 bp, synthetic construct
  source 1..18: mol_type = other DNA
caggtctagccaggaagc

SEQ ID NO: 30294 - DNA, 18 bp, synthetic construct
  source 1..18: mol_type = other DNA
gcaggtctagccaggaag

SEQ ID NO: 30295 - DNA, 18 bp, synthetic construct
  source 1..18: mol_type = other DNA
cgcaggtctagccaggaa

SEQ ID NO: 30296 - DNA, 18 bp, synthetic construct
  source 1..18: mol_type = other DNA
cttgcacgtcagccgggg

SEQ ID NO: 30297 - DNA, 18 bp, synthetic construct
  source 1..18: mol_type = other DNA
agctcccttgcacgtcag

SEQ ID NO: 30298 - DNA, 18 bp, synthetic construct
  source 1..18: mol_type = other DNA
cgagctcccttgcacgtc

SEQ ID NO: 30299 - DNA, 18 bp, synthetic construct
  source 1..18: mol_type = other DNA
agcgagctcccttgcacg

SEQ ID NO: 30300 - DNA, 18 bp, synthetic construct
  source 1..18: mol_type = other DNA
cagcgagctcccttgcac

SEQ ID NO: 30301 - DNA, 18 bp, synthetic construct
  source 1..18: mol_type = other DNA
agagaggccagcgagctc

SEQ ID NO: 30302 - DNA, 18 bp, synthetic construct
  source 1..18: mol_type = other DNA
cagagaggccagcgagct

SEQ ID NO: 30303 - DNA, 18 bp, synthetic construct
  source 1..18: mol_type = other DNA
acagagaggccagcgagc

SEQ ID NO: 30304 - DNA, 18 bp, synthetic construct
  source 1..18: mol_type = other DNA
cacagagaggccagcgag

SEQ ID NO: 30305 - DNA, 18 bp, synthetic construct
  source 1..18: mol_type = other DNA
gcacagagaggccagcga

SEQ ID NO: 30306 - DNA, 18 bp, synthetic construct
  source 1..18: mol_type = other DNA
ggcacagagaggccagcg

SEQ ID NO: 30307 - DNA, 18 bp, synthetic construct
  source 1..18: mol_type = other DNA
agggcacagagaggccag

SEQ ID NO: 30308 - DNA, 18 bp, synthetic construct
  source 1..18: mol_type = other DNA
aagggcacagagaggcca

SEQ ID NO: 30309 - DNA, 18 bp, synthetic construct
  source 1..18: mol_type = other DNA
caagggcacagagaggcc

SEQ ID NO: 30310 - DNA, 18 bp, synthetic construct
  source 1..18: mol_type = other DNA
acaagggcacagagaggc

SEQ ID NO: 30311 - DNA, 18 bp, synthetic construct
  source 1..18: mol_type = other DNA
aacaagggcacagagagg

SEQ ID NO: 30312 - DNA, 18 bp, synthetic construct
  source 1..18: mol_type = other DNA
cagccagaatttcacgga

SEQ ID NO: 30313 - DNA, 18 bp, synthetic construct
  source 1..18: mol_type = other DNA
tcagccagaatttcacgg

SEQ ID NO: 30314 - DNA, 18 bp, synthetic construct
  source 1..18: mol_type = other DNA
ttcagccagaatttcacg

SEQ ID NO: 30315 - DNA, 18 bp, synthetic construct
  source 1..18: mol_type = other DNA
attcagccagaatttcac

SEQ ID NO: 30316 - DNA, 18 bp, synthetic construct
  source 1..18: mol_type = other DNA
cattcagccagaatttca

SEQ ID NO: 30317 - DNA, 18 bp, synthetic construct
  source 1..18: mol_type = other DNA
acattcagccagaatttc

SEQ ID NO: 30318 - DNA, 18 bp, synthetic construct
  source 1..18: mol_type = other DNA
gacattcagccagaattt

SEQ ID NO: 30319 - DNA, 18 bp, synthetic construct
  source 1..18: mol_type = other DNA
agacattcagccagaatt

SEQ ID NO: 30320 - DNA, 18 bp, synthetic construct
  source 1..18: mol_type = other DNA
gagacattcagccagaat

SEQ ID NO: 30321 - DNA, 18 bp, synthetic construct
  source 1..18: mol_type = other DNA
ggagacattcagccagaa

SEQ ID NO: 30322 - DNA, 18 bp, synthetic construct
  source 1..18: mol_type = other DNA
gggagacattcagccaga

SEQ ID NO: 30323 - DNA, 18 bp, synthetic construct
  source 1..18: mol_type = other DNA
ggggagacattcagccag

SEQ ID NO: 30324 - DNA, 18 bp, synthetic construct
  source 1..18: mol_type = other DNA
gggggagacattcagcca

SEQ ID NO: 30325 - DNA, 18 bp, synthetic construct
  source 1..18: mol_type = other DNA
ggggggagacattcagcc

SEQ ID NO: 30326 - DNA, 18 bp, synthetic construct
  source 1..18: mol_type = other DNA
tggggggagacattcagc

SEQ ID NO: 30327 - DNA, 18 bp, synthetic construct
  source 1..18: mol_type = other DNA
gtggggggagacattcag

SEQ ID NO: 30328 - DNA, 18 bp, synthetic construct
  source 1..18: mol_type = other DNA
ggtggggggagacattca

SEQ ID NO: 30329 - DNA, 18 bp, synthetic construct
  source 1..18: mol_type = other DNA
aggtggggggagacattc

SEQ ID NO: 30330 - DNA, 18 bp, synthetic construct
  source 1..18: mol_type = other DNA
aaggtggggggagacatt

SEQ ID NO: 30331 - DNA, 18 bp, synthetic construct
  source 1..18: mol_type = other DNA
gaaggtggggggagacat

SEQ ID NO: 30332 - DNA, 18 bp, synthetic construct
  source 1..18: mol_type = other DNA
ggaaggtggggggagaca

SEQ ID NO: 30333 - DNA, 18 bp, synthetic construct
  source 1..18: mol_type = other DNA
cggaaggtggggggagac

SEQ ID NO: 30334 - DNA, 18 bp, synthetic construct
  source 1..18: mol_type = other DNA
tcggaaggtggggggaga

SEQ ID NO: 30335 - DNA, 18 bp, synthetic construct
  source 1..18: mol_type = other DNA
gtcggaaggtggggggag

SEQ ID NO: 30336 - DNA, 18 bp, synthetic construct
  source 1..18: mol_type = other DNA
cgtcggaaggtgggggga

SEQ ID NO: 30337 - DNA, 18 bp, synthetic construct
  source 1..18: mol_type = other DNA
gcgtcggaaggtgggggg

SEQ ID NO: 30338 - DNA, 18 bp, synthetic construct
  source 1..18: mol_type = other DNA
agcgtcggaaggtggggg

SEQ ID NO: 30339 - DNA, 18 bp, synthetic construct
  source 1..18: mol_type = other DNA
cagcgtcggaaggtgggg

SEQ ID NO: 30340 - DNA, 18 bp, synthetic construct
  source 1..18: mol_type = other DNA
acagcgtcggaaggtggg

SEQ ID NO: 30341 - DNA, 18 bp, synthetic construct
  source 1..18: mol_type = other DNA
gacagcgtcggaaggtgg

SEQ ID NO: 30342 - DNA, 18 bp, synthetic construct
  source 1..18: mol_type = other DNA
agacagcgtcggaaggtg

SEQ ID NO: 30343 - DNA, 18 bp, synthetic construct
  source 1..18: mol_type = other DNA
tagacagcgtcggaaggt

SEQ ID NO: 30344 - DNA, 18 bp, synthetic construct
  source 1..18: mol_type = other DNA
ctagacagcgtcggaagg

SEQ ID NO: 30345 - DNA, 18 bp, synthetic construct
  source 1..18: mol_type = other DNA
cctagacagcgtcggaag

SEQ ID NO: 30346 - DNA, 18 bp, synthetic construct
  source 1..18: mol_type = other DNA
gcctagacagcgtcggaa

SEQ ID NO: 30347 - DNA, 18 bp, synthetic construct
  source 1..18: mol_type = other DNA
tgcctagacagcgtcgga

SEQ ID NO: 30348 - DNA, 18 bp, synthetic construct
  source 1..18: mol_type = other DNA
ttgcctagacagcgtcgg

SEQ ID NO: 30349 - DNA, 18 bp, synthetic construct
  source 1..18: mol_type = other DNA
tttgcctagacagcgtcg

SEQ ID NO: 30350 - DNA, 18 bp, synthetic construct
  source 1..18: mol_type = other DNA
gtttgcctagacagcgtc

SEQ ID NO: 30351 - DNA, 18 bp, synthetic construct
  source 1..18: mol_type = other DNA
ggtttgcctagacagcgt

SEQ ID NO: 30352 - DNA, 18 bp, synthetic construct
  source 1..18: mol_type = other DNA
aggtttgcctagacagcg

SEQ ID NO: 30353 - DNA, 18 bp, synthetic construct
  source 1..18: mol_type = other DNA
caggtttgcctagacagc

SEQ ID NO: 30354 - DNA, 18 bp, synthetic construct
  source 1..18: mol_type = other DNA
ccaggtttgcctagacag

SEQ ID NO: 30355 - DNA, 18 bp, synthetic construct
  source 1..18: mol_type = other DNA
tccaggtttgcctagaca

SEQ ID NO: 30356 - DNA, 18 bp, synthetic construct
  source 1..18: mol_type = other DNA
atccaggtttgcctagac

SEQ ID NO: 30357 - DNA, 18 bp, synthetic construct
  source 1..18: mol_type = other DNA
aatccaggtttgcctaga

SEQ ID NO: 30358 - DNA, 18 bp, synthetic construct
  source 1..18: mol_type = other DNA
taatccaggtttgcctag

SEQ ID NO: 30359 - DNA, 18 bp, synthetic construct
  source 1..18: mol_type = other DNA
ctaatccaggtttgccta

SEQ ID NO: 30360 - DNA, 18 bp, synthetic construct
  source 1..18: mol_type = other DNA
tctaatccaggtttgcct

SEQ ID NO: 30361 - DNA, 18 bp, synthetic construct
  source 1..18: mol_type = other DNA
ctctaatccaggtttgcc

SEQ ID NO: 30362 - DNA, 18 bp, synthetic construct
  source 1..18: mol_type = other DNA
actctaatccaggtttgc

SEQ ID NO: 30363 - DNA, 18 bp, synthetic construct
  source 1..18: mol_type = other DNA
aactctaatccaggtttg

SEQ ID NO: 30364 - DNA, 18 bp, synthetic construct
  source 1..18: mol_type = other DNA
taactctaatccaggttt

SEQ ID NO: 30365 - DNA, 18 bp, synthetic construct
  source 1..18: mol_type = other DNA
gtaactctaatccaggtt

SEQ ID NO: 30366 - DNA, 18 bp, synthetic construct
  source 1..18: mol_type = other DNA
tgtaactctaatccaggt

SEQ ID NO: 30367 - DNA, 18 bp, synthetic construct
  source 1..18: mol_type = other DNA
atgtaactctaatccagg

SEQ ID NO: 30368 - DNA, 18 bp, synthetic construct
  source 1..18: mol_type = other DNA
ccaggagatgtaactcta

SEQ ID NO: 30369 - DNA, 18 bp, synthetic construct
  source 1..18: mol_type = other DNA
tccaggagatgtaactct

SEQ ID NO: 30370 - DNA, 18 bp, synthetic construct
  source 1..18: mol_type = other DNA
atccaggagatgtaactc

SEQ ID NO: 30371 - DNA, 18 bp, synthetic construct
  source 1..18: mol_type = other DNA
catccaggagatgtaact

SEQ ID NO: 30372 - DNA, 18 bp, synthetic construct
  source 1..18: mol_type = other DNA
tcatccaggagatgtaac

SEQ ID NO: 30373 - DNA, 18 bp, synthetic construct
  source 1..18: mol_type = other DNA
atcatccaggagatgtaa

SEQ ID NO: 30374 - DNA, 18 bp, synthetic construct
  source 1..18: mol_type = other DNA
aatcatccaggagatgta

SEQ ID NO: 30375 - DNA, 18 bp, synthetic construct
  source 1..18: mol_type = other DNA
taatcatccaggagatgt

SEQ ID NO: 30376 - DNA, 18 bp, synthetic construct
  source 1..18: mol_type = other DNA
ctaatcatccaggagatg

SEQ ID NO: 30377 - DNA, 18 bp, synthetic construct
  source 1..18: mol_type = other DNA
actaatcatccaggagat

SEQ ID NO: 30378 - DNA, 18 bp, synthetic construct
  source 1..18: mol_type = other DNA
aactaatcatccaggaga

SEQ ID NO: 30379 - DNA, 18 bp, synthetic construct
  source 1..18: mol_type = other DNA
gaactaatcatccaggag

SEQ ID NO: 30380 - DNA, 18 bp, synthetic construct
  source 1..18: mol_type = other DNA
ctgaactaatcatccagg

SEQ ID NO: 30381 - DNA, 18 bp, synthetic construct
  source 1..18: mol_type = other DNA
ctctgaactaatcatcca

SEQ ID NO: 30382 - DNA, 18 bp, synthetic construct
  source 1..18: mol_type = other DNA
tctctgaactaatcatcc

SEQ ID NO: 30383 - DNA, 18 bp, synthetic construct
  source 1..18: mol_type = other DNA
acagggagggggcatttt

SEQ ID NO: 30384 - DNA, 18 bp, synthetic construct
  source 1..18: mol_type = other DNA
cacagggagggggcattt

SEQ ID NO: 30385 - DNA, 18 bp, synthetic construct
  source 1..18: mol_type = other DNA
ccacagggagggggcatt

SEQ ID NO: 30386 - DNA, 18 bp, synthetic construct
  source 1..18: mol_type = other DNA
ggatccacagggaggggg

SEQ ID NO: 30387 - DNA, 18 bp, synthetic construct
  source 1..18: mol_type = other DNA
aggatccacagggagggg

SEQ ID NO: 30388 - DNA, 18 bp, synthetic construct
  source 1..18: mol_type = other DNA
taggatccacagggaggg

SEQ ID NO: 30389 - DNA, 18 bp, synthetic construct
  source 1..18: mol_type = other DNA
ataggatccacagggagg

SEQ ID NO: 30390 - DNA, 18 bp, synthetic construct
  source 1..18: mol_type = other DNA
tataggatccacagggag

SEQ ID NO: 30391 - DNA, 18 bp, synthetic construct
  source 1..18: mol_type = other DNA
ctataggatccacaggga

SEQ ID NO: 30392 - DNA, 18 bp, synthetic construct
  source 1..18: mol_type = other DNA
tctataggatccacaggg

SEQ ID NO: 30393 - DNA, 18 bp, synthetic construct
  source 1..18: mol_type = other DNA
ttctataggatccacagg

SEQ ID NO: 30394 - DNA, 18 bp, synthetic construct
  source 1..18: mol_type = other DNA
cttctataggatccacag

SEQ ID NO: 30395 - DNA, 18 bp, synthetic construct
  source 1..18: mol_type = other DNA
tcttctataggatccaca

SEQ ID NO: 30396 - DNA, 18 bp, synthetic construct
  source 1..18: mol_type = other DNA
atcttctataggatccac

SEQ ID NO: 30397 - DNA, 18 bp, synthetic construct
  source 1..18: mol_type = other DNA
aatcttctataggatcca

SEQ ID NO: 30398 - DNA, 18 bp, synthetic construct
  source 1..18: mol_type = other DNA
ctgcactcatcacacaaa

SEQ ID NO: 30399 - DNA, 18 bp, synthetic construct
  source 1..18: mol_type = other DNA
tctgcactcatcacacaa

SEQ ID NO: 30400 - DNA, 18 bp, synthetic construct
  source 1..18: mol_type = other DNA
ctctgcactcatcacaca

SEQ ID NO: 30401 - DNA, 18 bp, synthetic construct
  source 1..18: mol_type = other DNA
tctctgcactcatcacac

SEQ ID NO: 30402 - DNA, 18 bp, synthetic construct
  source 1..18: mol_type = other DNA
atctctgcactcatcaca

SEQ ID NO: 30403 - DNA, 18 bp, synthetic construct
  source 1..18: mol_type = other DNA
tatctctgcactcatcac

SEQ ID NO: 30404 - DNA, 18 bp, synthetic construct
  source 1..18: mol_type = other DNA
atatctctgcactcatca

SEQ ID NO: 30405 - DNA, 18 bp, synthetic construct
  source 1..18: mol_type = other DNA
catatctctgcactcatc

SEQ ID NO: 30406 - DNA, 18 bp, synthetic construct
  source 1..18: mol_type = other DNA
acatatctctgcactcat

SEQ ID NO: 30407 - DNA, 18 bp, synthetic construct
  source 1..18: mol_type = other DNA
gacatatctctgcactca

SEQ ID NO: 30408 - DNA, 18 bp, synthetic construct
  source 1..18: mol_type = other DNA
tgacatatctctgcactc

SEQ ID NO: 30409 - DNA, 18 bp, synthetic construct
  source 1..18: mol_type = other DNA
gtgacatatctctgcact

SEQ ID NO: 30410 - DNA, 18 bp, synthetic construct
  source 1..18: mol_type = other DNA
tgtgacatatctctgcac

SEQ ID NO: 30411 - DNA, 18 bp, synthetic construct
  source 1..18: mol_type = other DNA
ttgtgacatatctctgca

SEQ ID NO: 30412 - DNA, 18 bp, synthetic construct
  source 1..18: mol_type = other DNA
attgtgacatatctctgc

SEQ ID NO: 30413 - DNA, 18 bp, synthetic construct
  source 1..18: mol_type = other DNA
gggatattgtgacatatc

SEQ ID NO: 30414 - DNA, 18 bp, synthetic construct
  source 1..18: mol_type = other DNA
ggggatattgtgacatat

SEQ ID NO: 30415 - DNA, 18 bp, synthetic construct
  source 1..18: mol_type = other DNA
aggggatattgtgacata

SEQ ID NO: 30416 - DNA, 18 bp, synthetic construct
  source 1..18: mol_type = other DNA
caggggatattgtgacat

SEQ ID NO: 30417 - DNA, 18 bp, synthetic construct
  source 1..18: mol_type = other DNA
acaggggatattgtgaca

SEQ ID NO: 30418 - DNA, 18 bp, synthetic construct
  source 1..18: mol_type = other DNA
tacaggggatattgtgac

SEQ ID NO: 30419 - DNA, 18 bp, synthetic construct
  source 1..18: mol_type = other DNA
ctacaggggatattgtga

SEQ ID NO: 30420 - DNA, 18 bp, synthetic construct
  source 1..18: mol_type = other DNA
tctacaggggatattgtg

SEQ ID NO: 30421 - DNA, 18 bp, synthetic construct
  source 1..18: mol_type = other DNA
ttctacaggggatattgt

SEQ ID NO: 30422 - DNA, 18 bp, synthetic construct
  source 1..18: mol_type = other DNA
tttctacaggggatattg

SEQ ID NO: 30423 - DNA, 18 bp, synthetic construct
  source 1..18: mol_type = other DNA
ttttctacaggggatatt

SEQ ID NO: 30424 - DNA, 18 bp, synthetic construct
  source 1..18: mol_type = other DNA
tttttctacaggggatat

SEQ ID NO: 30425 - DNA, 18 bp, synthetic construct
  source 1..18: mol_type = other DNA
ctttttctacaggggata

SEQ ID NO: 30426 - DNA, 18 bp, synthetic construct
  source 1..18: mol_type = other DNA
gctttttctacaggggat

SEQ ID NO: 30427 - DNA, 18 bp, synthetic construct
  source 1..18: mol_type = other DNA
ggctttttctacagggga

SEQ ID NO: 30428 - DNA, 18 bp, synthetic construct
  source 1..18: mol_type = other DNA
aggctttttctacagggg

SEQ ID NO: 30429 - DNA, 18 bp, synthetic construct
  source 1..18: mol_type = other DNA
caggctttttctacaggg

SEQ ID NO: 30430 - DNA, 18 bp, synthetic construct
  source 1..18: mol_type = other DNA
tcaggctttttctacagg

SEQ ID NO: 30431 - DNA, 18 bp, synthetic construct
  source 1..18: mol_type = other DNA
ttcaggctttttctacag

SEQ ID NO: 30432 - DNA, 18 bp, synthetic construct
  source 1..18: mol_type = other DNA
tttcaggctttttctaca

SEQ ID NO: 30433 - DNA, 18 bp, synthetic construct
  source 1..18: mol_type = other DNA
atttcaggctttttctac

SEQ ID NO: 30434 - DNA, 18 bp, synthetic construct
  source 1..18: mol_type = other DNA
aatttcaggctttttcta

SEQ ID NO: 30435 - DNA, 18 bp, synthetic construct
  source 1..18: mol_type = other DNA
caatttcaggctttttct

SEQ ID NO: 30436 - DNA, 18 bp, synthetic construct
  source 1..18: mol_type = other DNA
gcactgatcaccgaagtt

SEQ ID NO: 30437 - DNA, 18 bp, synthetic construct
  source 1..18: mol_type = other DNA
tgcactgatcaccgaagt

SEQ ID NO: 30438 - DNA, 18 bp, synthetic construct
  source 1..18: mol_type = other DNA
ctgcactgatcaccgaag

SEQ ID NO: 30439 - DNA, 18 bp, synthetic construct
  source 1..18: mol_type = other DNA
tctgcactgatcaccgaa

SEQ ID NO: 30440 - DNA, 18 bp, synthetic construct
  source 1..18: mol_type = other DNA
atctgcactgatcaccga

SEQ ID NO: 30441 - DNA, 18 bp, synthetic construct
  source 1..18: mol_type = other DNA
catctgcactgatcaccg

SEQ ID NO: 30442 - DNA, 18 bp, synthetic construct
  source 1..18: mol_type = other DNA
acatctgcactgatcacc

SEQ ID NO: 30443 - DNA, 18 bp, synthetic construct
  source 1..18: mol_type = other DNA
cacatctgcactgatcac

SEQ ID NO: 30444 - DNA, 18 bp, synthetic construct
  source 1..18: mol_type = other DNA
acacatctgcactgatca

SEQ ID NO: 30445 - DNA, 18 bp, synthetic construct
  source 1..18: mol_type = other DNA
aacacatctgcactgatc

SEQ ID NO: 30446 - DNA, 18 bp, synthetic construct
  source 1..18: mol_type = other DNA
gaaacacatctgcactga

SEQ ID NO: 30447 - DNA, 18 bp, synthetic construct
  source 1..18: mol_type = other DNA
ctgaaacacatctgcact

SEQ ID NO: 30448 - DNA, 18 bp, synthetic construct
  source 1..18: mol_type = other DNA
tctgaaacacatctgcac

SEQ ID NO: 30449 - DNA, 18 bp, synthetic construct
  source 1..18: mol_type = other DNA
ttctgaaacacatctgca

SEQ ID NO: 30450 - DNA, 18 bp, synthetic construct
  source 1..18: mol_type = other DNA
gttctgaaacacatctgc

SEQ ID NO: 30451 - DNA, 18 bp, synthetic construct
  source 1..18: mol_type = other DNA
ggagttctgaaacacatc

SEQ ID NO: 30452 - DNA, 18 bp, synthetic construct
  source 1..18: mol_type = other DNA
ctactatggagttctgaa

SEQ ID NO: 30453 - DNA, 18 bp, synthetic construct
  source 1..18: mol_type = other DNA
tctactatggagttctga

SEQ ID NO: 30454 - DNA, 18 bp, synthetic construct
  source 1..18: mol_type = other DNA
gtctactatggagttctg

SEQ ID NO: 30455 - DNA, 18 bp, synthetic construct
  source 1..18: mol_type = other DNA
agtctactatggagttct

SEQ ID NO: 30456 - DNA, 18 bp, synthetic construct
  source 1..18: mol_type = other DNA
cagtctactatggagttc

SEQ ID NO: 30457 - DNA, 18 bp, synthetic construct
  source 1..18: mol_type = other DNA
tcagtctactatggagtt

SEQ ID NO: 30458 - DNA, 18 bp, synthetic construct
  source 1..18: mol_type = other DNA
ttcagtctactatggagt

SEQ ID NO: 30459 - DNA, 18 bp, synthetic construct
  source 1..18: mol_type = other DNA
gttcagtctactatggag

SEQ ID NO: 30460 - DNA, 18 bp, synthetic construct
  source 1..18: mol_type = other DNA
ggttcagtctactatgga

SEQ ID NO: 30461 - DNA, 18 bp, synthetic construct
  source 1..18: mol_type = other DNA
aggttcagtctactatgg

SEQ ID NO: 30462 - DNA, 18 bp, synthetic construct
  source 1..18: mol_type = other DNA
taggttcagtctactatg

SEQ ID NO: 30463 - DNA, 18 bp, synthetic construct
  source 1..18: mol_type = other DNA
ctaggttcagtctactat

SEQ ID NO: 30464 - DNA, 18 bp, synthetic construct
  source 1..18: mol_type = other DNA
tctaggttcagtctacta

SEQ ID NO: 30465 - DNA, 18 bp, synthetic construct
  source 1..18: mol_type = other DNA
ctctaggttcagtctact

SEQ ID NO: 30466 - DNA, 18 bp, synthetic construct
  source 1..18: mol_type = other DNA
tctctaggttcagtctac

SEQ ID NO: 30467 - DNA, 18 bp, synthetic construct
  source 1..18: mol_type = other DNA
ttctctaggttcagtcta

SEQ ID NO: 30468 - DNA, 18 bp, synthetic construct
  source 1..18: mol_type = other DNA
attctctaggttcagtct

SEQ ID NO: 30469 - DNA, 18 bp, synthetic construct
  source 1..18: mol_type = other DNA
cattctctaggttcagtc

SEQ ID NO: 30470 - DNA, 18 bp, synthetic construct
  source 1..18: mol_type = other DNA
ccattctctaggttcagt

SEQ ID NO: 30471 - DNA, 18 bp, synthetic construct
  source 1..18: mol_type = other DNA
accattctctaggttcag

SEQ ID NO: 30472 - DNA, 18 bp, synthetic construct
  source 1..18: mol_type = other DNA
aaccattctctaggttca

SEQ ID NO: 30473 - DNA, 18 bp, synthetic construct
  source 1..18: mol_type = other DNA
taaccattctctaggttc

SEQ ID NO: 30474 - DNA, 18 bp, synthetic construct
  source 1..18: mol_type = other DNA
gtaaccattctctaggtt

SEQ ID NO: 30475 - DNA, 18 bp, synthetic construct
  source 1..18: mol_type = other DNA
tgtaaccattctctaggt

SEQ ID NO: 30476 - DNA, 18 bp, synthetic construct
  source 1..18: mol_type = other DNA
atgtaaccattctctagg

SEQ ID NO: 30477 - DNA, 18 bp, synthetic construct
  source 1..18: mol_type = other DNA
gatgtaaccattctctag

SEQ ID NO: 30478 - DNA, 18 bp, synthetic construct
  source 1..18: mol_type = other DNA
tgatgtaaccattctcta

SEQ ID NO: 30479 - DNA, 18 bp, synthetic construct
  source 1..18: mol_type = other DNA
gtgatgtaaccattctct

SEQ ID NO: 30480 - DNA, 18 bp, synthetic construct
  source 1..18: mol_type = other DNA
agtgatgtaaccattctc

SEQ ID NO: 30481 - DNA, 18 bp, synthetic construct
  source 1..18: mol_type = other DNA
cctaagtgatgtaaccat

SEQ ID NO: 30482 - DNA, 18 bp, synthetic construct
  source 1..18: mol_type = other DNA
acctaagtgatgtaacca

SEQ ID NO: 30483 - DNA, 18 bp, synthetic construct
  source 1..18: mol_type = other DNA
cacctaagtgatgtaacc

SEQ ID NO: 30484 - DNA, 18 bp, synthetic construct
  source 1..18: mol_type = other DNA
gatcacctaagtgatgta

SEQ ID NO: 30485 - DNA, 18 bp, synthetic construct
  source 1..18: mol_type = other DNA
tgatcacctaagtgatgt

SEQ ID NO: 30486 - DNA, 18 bp, synthetic construct
  source 1..18: mol_type = other DNA
ctgatcacctaagtgatg

SEQ ID NO: 30487 - DNA, 18 bp, synthetic construct
  source 1..18: mol_type = other DNA
actgatcacctaagtgat

SEQ ID NO: 30488 - DNA, 18 bp, synthetic construct
  source 1..18: mol_type = other DNA
cactgatcacctaagtga

SEQ ID NO: 30489 - DNA, 18 bp, synthetic construct
  source 1..18: mol_type = other DNA
acactgatcacctaagtg

SEQ ID NO: 30490 - DNA, 18 bp, synthetic construct
  source 1..18: mol_type = other DNA
tacactgatcacctaagt

SEQ ID NO: 30491 - DNA, 18 bp, synthetic construct
  source 1..18: mol_type = other DNA
ctacactgatcacctaag

SEQ ID NO: 30492 - DNA, 18 bp, synthetic construct
  source 1..18: mol_type = other DNA
tctacactgatcacctaa

SEQ ID NO: 30493 - DNA, 18 bp, synthetic construct
  source 1..18: mol_type = other DNA
ctctacactgatcaccta

SEQ ID NO: 30494 - DNA, 18 bp, synthetic construct
  source 1..18: mol_type = other DNA
tctctacactgatcacct

SEQ ID NO: 30495 - DNA, 18 bp, synthetic construct
  source 1..18: mol_type = other DNA
atctctacactgatcacc

SEQ ID NO: 30496 - DNA, 18 bp, synthetic construct
  source 1..18: mol_type = other DNA
tatctctacactgatcac

SEQ ID NO: 30497 - DNA, 18 bp, synthetic construct
  source 1..18: mol_type = other DNA
atatctctacactgatca

SEQ ID NO: 30498 - DNA, 18 bp, synthetic construct
  source 1..18: mol_type = other DNA
catatctctacactgatc

SEQ ID NO: 30499 - DNA, 18 bp, synthetic construct
  source 1..18: mol_type = other DNA
tctgtctacacgagaatt

SEQ ID NO: 30500 - DNA, 18 bp, synthetic construct
  source 1..18: mol_type = other DNA
ctctgtctacacgagaat

SEQ ID NO: 30501 - DNA, 18 bp, synthetic construct
  source 1..18: mol_type = other DNA
gctctgtctacacgagaa

SEQ ID NO: 30502 - DNA, 18 bp, synthetic construct
  source 1..18: mol_type = other DNA
ggctctgtctacacgaga

SEQ ID NO: 30503 - DNA, 18 bp, synthetic construct
  source 1..18: mol_type = other DNA
aggctctgtctacacgag

SEQ ID NO: 30504 - DNA, 18 bp, synthetic construct
  source 1..18: mol_type = other DNA
taggctctgtctacacga

SEQ ID NO: 30505 - DNA, 18 bp, synthetic construct
  source 1..18: mol_type = other DNA
ctaggctctgtctacacg

SEQ ID NO: 30506 - DNA, 18 bp, synthetic construct
  source 1..18: mol_type = other DNA
tctaggctctgtctacac

SEQ ID NO: 30507 - DNA, 18 bp, synthetic construct
  source 1..18: mol_type = other DNA
gtctaggctctgtctaca

SEQ ID NO: 30508 - DNA, 18 bp, synthetic construct
  source 1..18: mol_type = other DNA
tgtctaggctctgtctac

SEQ ID NO: 30509 - DNA, 18 bp, synthetic construct
  source 1..18: mol_type = other DNA
ttgtctaggctctgtcta

SEQ ID NO: 30510 - DNA, 18 bp, synthetic construct
  source 1..18: mol_type = other DNA
attgtctaggctctgtct

SEQ ID NO: 30511 - DNA, 18 bp, synthetic construct
  source 1..18: mol_type = other DNA
aattgtctaggctctgtc

SEQ ID NO: 30512 - DNA, 18 bp, synthetic construct
  source 1..18: mol_type = other DNA
caattgtctaggctctgt

SEQ ID NO: 30513 - DNA, 18 bp, synthetic construct
  source 1..18: mol_type = other DNA
acaattgtctaggctctg

SEQ ID NO: 30514 - DNA, 18 bp, synthetic construct
  source 1..18: mol_type = other DNA
aacaattgtctaggctct

SEQ ID NO: 30515 - DNA, 18 bp, synthetic construct
  source 1..18: mol_type = other DNA
taacaattgtctaggctc

SEQ ID NO: 30516 - DNA, 18 bp, synthetic construct
  source 1..18: mol_type = other DNA
gtaacaattgtctaggct

SEQ ID NO: 30517 - DNA, 18 bp, synthetic construct
  source 1..18: mol_type = other DNA
tgtaacaattgtctaggc

SEQ ID NO: 30518 - DNA, 18 bp, synthetic construct
  source 1..18: mol_type = other DNA
tcactaggtgatgtaaca

SEQ ID NO: 30519 - DNA, 18 bp, synthetic construct
  source 1..18: mol_type = other DNA
gatcactaggtgatgtaa

SEQ ID NO: 30520 - DNA, 18 bp, synthetic construct
  source 1..18: mol_type = other DNA
tgatcactaggtgatgta

SEQ ID NO: 30521 - DNA, 18 bp, synthetic construct
  source 1..18: mol_type = other DNA
ctgatcactaggtgatgt

SEQ ID NO: 30522 - DNA, 18 bp, synthetic construct
  source 1..18: mol_type = other DNA
actgatcactaggtgatg

SEQ ID NO: 30523 - DNA, 18 bp, synthetic construct
  source 1..18: mol_type = other DNA
cactgatcactaggtgat

SEQ ID NO: 30524 - DNA, 18 bp, synthetic construct
  source 1..18: mol_type = other DNA
gcactgatcactaggtga

SEQ ID NO: 30525 - DNA, 18 bp, synthetic construct
  source 1..18: mol_type = other DNA
tgcactgatcactaggtg

SEQ ID NO: 30526 - DNA, 18 bp, synthetic construct
  source 1..18: mol_type = other DNA
ctgcactgatcactaggt

SEQ ID NO: 30527 - DNA, 18 bp, synthetic construct
  source 1..18: mol_type = other DNA
cctgcactgatcactagg

SEQ ID NO: 30528 - DNA, 18 bp, synthetic construct
  source 1..18: mol_type = other DNA
ccctgcactgatcactag

SEQ ID NO: 30529 - DNA, 18 bp, synthetic construct
  source 1..18: mol_type = other DNA
tccctgcactgatcacta

SEQ ID NO: 30530 - DNA, 18 bp, synthetic construct
  source 1..18: mol_type = other DNA
atccctgcactgatcact

SEQ ID NO: 30531 - DNA, 18 bp, synthetic construct
  source 1..18: mol_type = other DNA
tatccctgcactgatcac

SEQ ID NO: 30532 - DNA, 18 bp, synthetic construct
  source 1..18: mol_type = other DNA
ttatccctgcactgatca

SEQ ID NO: 30533 - DNA, 18 bp, synthetic construct
  source 1..18: mol_type = other DNA
cttatccctgcactgatc

SEQ ID NO: 30534 - DNA, 18 bp, synthetic construct
  source 1..18: mol_type = other DNA
acttatccctgcactgat

SEQ ID NO: 30535 - DNA, 18 bp, synthetic construct
  source 1..18: mol_type = other DNA
gacttatccctgcactga

SEQ ID NO: 30536 - DNA, 18 bp, synthetic construct
  source 1..18: mol_type = other DNA
tgacttatccctgcactg

SEQ ID NO: 30537 - DNA, 18 bp, synthetic construct
  source 1..18: mol_type = other DNA
atgacttatccctgcact

SEQ ID NO: 30538 - DNA, 18 bp, synthetic construct
  source 1..18: mol_type = other DNA
tatgacttatccctgcac

SEQ ID NO: 30539 - DNA, 18 bp, synthetic construct
  source 1..18: mol_type = other DNA
ttatgacttatccctgca

SEQ ID NO: 30540 - DNA, 18 bp, synthetic construct
  source 1..18: mol_type = other DNA
tttatgacttatccctgc

SEQ ID NO: 30541 - DNA, 18 bp, synthetic construct
  source 1..18: mol_type = other DNA
ctttatgacttatccctg

SEQ ID NO: 30542 - DNA, 18 bp, synthetic construct
  source 1..18: mol_type = other DNA
gctttatgacttatccct

SEQ ID NO: 30543 - DNA, 18 bp, synthetic construct
  source 1..18: mol_type = other DNA
ggctttatgacttatccc

SEQ ID NO: 30544 - DNA, 18 bp, synthetic construct
  source 1..18: mol_type = other DNA
aggctttatgacttatcc

SEQ ID NO: 30545 - DNA, 18 bp, synthetic construct
  source 1..18: mol_type = other DNA
gaggctttatgacttatc

SEQ ID NO: 30546 - DNA, 18 bp, synthetic construct
  source 1..18: mol_type = other DNA
ggaggctttatgacttat

SEQ ID NO: 30547 - DNA, 18 bp, synthetic construct
  source 1..18: mol_type = other DNA
aggaggctttatgactta

SEQ ID NO: 30548 - DNA, 18 bp, synthetic construct
  source 1..18: mol_type = other DNA
caggaggctttatgactt

SEQ ID NO: 30549 - DNA, 18 bp, synthetic construct
  source 1..18: mol_type = other DNA
acaggaggctttatgact

SEQ ID NO: 30550 - DNA, 18 bp, synthetic construct
  source 1..18: mol_type = other DNA
tacaggaggctttatgac

SEQ ID NO: 30551 - DNA, 18 bp, synthetic construct
  source 1..18: mol_type = other DNA
ctacaggaggctttatga

SEQ ID NO: 30552 - DNA, 18 bp, synthetic construct
  source 1..18: mol_type = other DNA
cctacaggaggctttatg

SEQ ID NO: 30553 - DNA, 18 bp, synthetic construct
  source 1..18: mol_type = other DNA
gcctacaggaggctttat

SEQ ID NO: 30554 - DNA, 18 bp, synthetic construct
  source 1..18: mol_type = other DNA
tgcctacaggaggcttta

SEQ ID NO: 30555 - DNA, 18 bp, synthetic construct
  source 1..18: mol_type = other DNA
ctgcctacaggaggcttt

SEQ ID NO: 30556 - DNA, 18 bp, synthetic construct
  source 1..18: mol_type = other DNA
tctgcctacaggaggctt

SEQ ID NO: 30557 - DNA, 18 bp, synthetic construct
  source 1..18: mol_type = other DNA
ctctgcctacaggaggct

SEQ ID NO: 30558 - DNA, 18 bp, synthetic construct
  source 1..18: mol_type = other DNA
actctgcctacaggaggc

SEQ ID NO: 30559 - DNA, 18 bp, synthetic construct
  source 1..18: mol_type = other DNA
cactctgcctacaggagg

SEQ ID NO: 30560 - DNA, 18 bp, synthetic construct
  source 1..18: mol_type = other DNA
acactctgcctacaggag

SEQ ID NO: 30561 - DNA, 18 bp, synthetic construct
  source 1..18: mol_type = other DNA
tacactctgcctacagga

SEQ ID NO: 30562 - DNA, 18 bp, synthetic construct
  source 1..18: mol_type = other DNA
ctacactctgcctacagg

SEQ ID NO: 30563 - DNA, 18 bp, synthetic construct
  source 1..18: mol_type = other DNA
cctacactctgcctacag

SEQ ID NO: 30564 - DNA, 18 bp, synthetic construct
  source 1..18: mol_type = other DNA
gcctacactctgcctaca

SEQ ID NO: 30565 - DNA, 18 bp, synthetic construct
  source 1..18: mol_type = other DNA
tgcctacactctgcctac

SEQ ID NO: 30566 - DNA, 18 bp, synthetic construct
  source 1..18: mol_type = other DNA
ttgcctacactctgccta

SEQ ID NO: 30567 - DNA, 18 bp, synthetic construct
  source 1..18: mol_type = other DNA
cttgcctacactctgcct

SEQ ID NO: 30568 - DNA, 18 bp, synthetic construct
  source 1..18: mol_type = other DNA
acttgcctacactctgcc

SEQ ID NO: 30569 - DNA, 18 bp, synthetic construct
  source 1..18: mol_type = other DNA
cacttgcctacactctgc

SEQ ID NO: 30570 - DNA, 18 bp, synthetic construct
  source 1..18: mol_type = other DNA
acacttgcctacactctg

SEQ ID NO: 30571 - DNA, 18 bp, synthetic construct
  source 1..18: mol_type = other DNA
aacacttgcctacactct

SEQ ID NO: 30572 - DNA, 18 bp, synthetic construct
  source 1..18: mol_type = other DNA
gaacacttgcctacactc

SEQ ID NO: 30573 - DNA, 18 bp, synthetic construct
  source 1..18: mol_type = other DNA
ggaacacttgcctacact

SEQ ID NO: 30574 - DNA, 18 bp, synthetic construct
  source 1..18: mol_type = other DNA
gggaacacttgcctacac

SEQ ID NO: 30575 - DNA, 18 bp, synthetic construct
  source 1..18: mol_type = other DNA
agggaacacttgcctaca

SEQ ID NO: 30576 - DNA, 18 bp, synthetic construct
  source 1..18: mol_type = other DNA
gagggaacacttgcctac

SEQ ID NO: 30577 - DNA, 18 bp, synthetic construct
  source 1..18: mol_type = other DNA
ggagggaacacttgccta

SEQ ID NO: 30578 - DNA, 18 bp, synthetic construct
  source 1..18: mol_type = other DNA
gggagggaacacttgcct

SEQ ID NO: 30579 - DNA, 18 bp, synthetic construct
  source 1..18: mol_type = other DNA
agggagggaacacttgcc

SEQ ID NO: 30580 - DNA, 18 bp, synthetic construct
  source 1..18: mol_type = other DNA
cagggagggaacacttgc

SEQ ID NO: 30581 - DNA, 18 bp, synthetic construct
  source 1..18: mol_type = other DNA
ccagggagggaacacttg

SEQ ID NO: 30582 - DNA, 18 bp, synthetic construct
  source 1..18: mol_type = other DNA
cccagggagggaacactt

SEQ ID NO: 30583 - DNA, 18 bp, synthetic construct
  source 1..18: mol_type = other DNA
gcccagggagggaacact

SEQ ID NO: 30584 - DNA, 18 bp, synthetic construct
  source 1..18: mol_type = other DNA
agcccagggagggaacac

SEQ ID NO: 30585 - DNA, 18 bp, synthetic construct
  source 1..18: mol_type = other DNA
cagcccagggagggaaca

SEQ ID NO: 30586 - DNA, 18 bp, synthetic construct
  source 1..18: mol_type = other DNA
tcagcccagggagggaac

SEQ ID NO: 30587 - DNA, 18 bp, synthetic construct
  source 1..18: mol_type = other DNA
atcagcccagggagggaa

SEQ ID NO: 30588 - DNA, 18 bp, synthetic construct
  source 1..18: mol_type = other DNA
gatcagcccagggaggga

SEQ ID NO: 30589 - DNA, 18 bp, synthetic construct
  source 1..18: mol_type = other DNA
tgatcagcccagggaggg

SEQ ID NO: 30590 - DNA, 18 bp, synthetic construct
  source 1..18: mol_type = other DNA
ctgatcagcccagggagg

SEQ ID NO: 30591 - DNA, 18 bp, synthetic construct
  source 1..18: mol_type = other DNA
actgatcagcccagggag

SEQ ID NO: 30592 - DNA, 18 bp, synthetic construct
  source 1..18: mol_type = other DNA
cactgatcagcccaggga

SEQ ID NO: 30593 - DNA, 18 bp, synthetic construct
  source 1..18: mol_type = other DNA
gcactgatcagcccaggg

SEQ ID NO: 30594 - DNA, 18 bp, synthetic construct
  source 1..18: mol_type = other DNA
tgcactgatcagcccagg

SEQ ID NO: 30595 - DNA, 18 bp, synthetic construct
  source 1..18: mol_type = other DNA
ctgcactgatcagcccag

SEQ ID NO: 30596 - DNA, 18 bp, synthetic construct
  source 1..18: mol_type = other DNA
tctgcactgatcagccca

SEQ ID NO: 30597 - DNA, 18 bp, synthetic construct
  source 1..18: mol_type = other DNA
ctctgcactgatcagccc

SEQ ID NO: 30598 - DNA, 18 bp, synthetic construct
  source 1..18: mol_type = other DNA
tctctgcactgatcagcc

SEQ ID NO: 30599 - DNA, 18 bp, synthetic construct
  source 1..18: mol_type = other DNA
atctctgcactgatcagc

SEQ ID NO: 30600 - DNA, 18 bp, synthetic construct
  source 1..18: mol_type = other DNA
tatctctgcactgatcag

SEQ ID NO: 30601 - DNA, 18 bp, synthetic construct
  source 1..18: mol_type = other DNA
atatctctgcactgatca

SEQ ID NO: 30602 - DNA, 18 bp, synthetic construct
  source 1..18: mol_type = other DNA
gatatctctgcactgatc

SEQ ID NO: 30603 - DNA, 18 bp, synthetic construct
  source 1..18: mol_type = other DNA
agatatctctgcactgat

SEQ ID NO: 30604 - DNA, 18 bp, synthetic construct
  source 1..18: mol_type = other DNA
gagatatctctgcactga

SEQ ID NO: 30605 - DNA, 18 bp, synthetic construct
  source 1..18: mol_type = other DNA
tgagatatctctgcactg

SEQ ID NO: 30606 - DNA, 18 bp, synthetic construct
  source 1..18: mol_type = other DNA
gtgagatatctctgcact

SEQ ID NO: 30607 - DNA, 18 bp, synthetic construct
  source 1..18: mol_type = other DNA
tgtgagatatctctgcac

SEQ ID NO: 30608 - DNA, 18 bp, synthetic construct
  source 1..18: mol_type = other DNA
ttgtgagatatctctgca

SEQ ID NO: 30609 - DNA, 18 bp, synthetic construct
  source 1..18: mol_type = other DNA
tttgtgagatatctctgc

SEQ ID NO: 30610 - DNA, 18 bp, synthetic construct
  source 1..18: mol_type = other DNA
ctttgtgagatatctctg

SEQ ID NO: 30611 - DNA, 18 bp, synthetic construct
  source 1..18: mol_type = other DNA
gctttgtgagatatctct

SEQ ID NO: 30612 - DNA, 18 bp, synthetic construct
  source 1..18: mol_type = other DNA
ggctttgtgagatatctc

SEQ ID NO: 30613 - DNA, 18 bp, synthetic construct
  source 1..18: mol_type = other DNA
gggctttgtgagatatct

SEQ ID NO: 30614 - DNA, 18 bp, synthetic construct
  source 1..18: mol_type = other DNA
ggggctttgtgagatatc

SEQ ID NO: 30615 - DNA, 18 bp, synthetic construct
  source 1..18: mol_type = other DNA
aggggctttgtgagatat

SEQ ID NO: 30616 - DNA, 18 bp, synthetic construct
  source 1..18: mol_type = other DNA
taggggctttgtgagata

SEQ ID NO: 30617 - DNA, 18 bp, synthetic construct
  source 1..18: mol_type = other DNA
ataggggctttgtgagat

SEQ ID NO: 30618 - DNA, 18 bp, synthetic construct
  source 1..18: mol_type = other DNA
tataggggctttgtgaga

SEQ ID NO: 30619 - DNA, 18 bp, synthetic construct
  source 1..18: mol_type = other DNA
ttataggggctttgtgag

SEQ ID NO: 30620 - DNA, 18 bp, synthetic construct
  source 1..18: mol_type = other DNA
cttataggggctttgtga

SEQ ID NO: 30621 - DNA, 18 bp, synthetic construct
  source 1..18: mol_type = other DNA
gcttataggggctttgtg

SEQ ID NO: 30622 - DNA, 18 bp, synthetic construct
  source 1..18: mol_type = other DNA
ggcttataggggctttgt

SEQ ID NO: 30623 - DNA, 18 bp, synthetic construct
  source 1..18: mol_type = other DNA
tggcttataggggctttg

SEQ ID NO: 30624 - DNA, 18 bp, synthetic construct
  source 1..18: mol_type = other DNA
ttggcttataggggcttt

SEQ ID NO: 30625 - DNA, 18 bp, synthetic construct
  source 1..18: mol_type = other DNA
tttggcttataggggctt

SEQ ID NO: 30626 - DNA, 18 bp, synthetic construct
  source 1..18: mol_type = other DNA
gtttggcttataggggct

SEQ ID NO: 30627 - DNA, 18 bp, synthetic construct
  source 1..18: mol_type = other DNA
ggtttggcttataggggc

SEQ ID NO: 30628 - DNA, 18 bp, synthetic construct
  source 1..18: mol_type = other DNA
aggtttggcttatagggg

SEQ ID NO: 30629 - DNA, 18 bp, synthetic construct
  source 1..18: mol_type = other DNA
aaggtttggcttataggg

SEQ ID NO: 30630 - DNA, 18 bp, synthetic construct
  source 1..18: mol_type = other DNA
caaggtttggcttatagg

SEQ ID NO: 30631 - DNA, 18 bp, synthetic construct
  source 1..18: mol_type = other DNA
tcaaggtttggcttatag

SEQ ID NO: 30632 - DNA, 18 bp, synthetic construct
  source 1..18: mol_type = other DNA
gtcaaggtttggcttata

SEQ ID NO: 30633 - DNA, 18 bp, synthetic construct
  source 1..18: mol_type = other DNA
tgtcaaggtttggcttat

SEQ ID NO: 30634 - DNA, 18 bp, synthetic construct
  source 1..18: mol_type = other DNA
ttgtcaaggtttggctta

SEQ ID NO: 30635 - DNA, 18 bp, synthetic construct
  source 1..18: mol_type = other DNA
cttgtcaaggtttggctt

SEQ ID NO: 30636 - DNA, 18 bp, synthetic construct
  source 1..18: mol_type = other DNA
ccttgtcaaggtttggct

SEQ ID NO: 30637 - DNA, 18 bp, synthetic construct
  source 1..18: mol_type = other DNA
cccttgtcaaggtttggc

SEQ ID NO: 30638 - DNA, 18 bp, synthetic construct
  source 1..18: mol_type = other DNA
acccttgtcaaggtttgg

SEQ ID NO: 30639 - DNA, 18 bp, synthetic construct
  source 1..18: mol_type = other DNA
aacccttgtcaaggtttg

SEQ ID NO: 30640 - DNA, 18 bp, synthetic construct
  source 1..18: mol_type = other DNA
taacccttgtcaaggttt

SEQ ID NO: 30641 - DNA, 18 bp, synthetic construct
  source 1..18: mol_type = other DNA
gtaacccttgtcaaggtt

SEQ ID NO: 30642 - DNA, 18 bp, synthetic construct
  source 1..18: mol_type = other DNA
tgtaacccttgtcaaggt

SEQ ID NO: 30643 - DNA, 18 bp, synthetic construct
  source 1..18: mol_type = other DNA
atgtaacccttgtcaagg

SEQ ID NO: 30644 - DNA, 18 bp, synthetic construct
  source 1..18: mol_type = other DNA
gatgtaacccttgtcaag

SEQ ID NO: 30645 - DNA, 18 bp, synthetic construct
  source 1..18: mol_type = other DNA
tgatgtaacccttgtcaa

SEQ ID NO: 30646 - DNA, 18 bp, synthetic construct
  source 1..18: mol_type = other DNA
gtgatgtaacccttgtca

SEQ ID NO: 30647 - DNA, 18 bp, synthetic construct
  source 1..18: mol_type = other DNA
ggtgatgtaacccttgtc

SEQ ID NO: 30648 - DNA, 18 bp, synthetic construct
  source 1..18: mol_type = other DNA
aggtgatgtaacccttgt

SEQ ID NO: 30649 - DNA, 18 bp, synthetic construct
  source 1..18: mol_type = other DNA
caggtgatgtaacccttg

SEQ ID NO: 30650 - DNA, 18 bp, synthetic construct
  source 1..18: mol_type = other DNA
acaggtgatgtaaccctt

SEQ ID NO: 30651 - DNA, 18 bp, synthetic construct
  source 1..18: mol_type = other DNA
aacaggtgatgtaaccct

SEQ ID NO: 30652 - DNA, 18 bp, synthetic construct
  source 1..18: mol_type = other DNA
aaacaggtgatgtaaccc

SEQ ID NO: 30653 - DNA, 18 bp, synthetic construct
  source 1..18: mol_type = other DNA
gctcaaacaggtgatgta

SEQ ID NO: 30654 - DNA, 18 bp, synthetic construct
  source 1..18: mol_type = other DNA
tgctcaaacaggtgatgt

SEQ ID NO: 30655 - DNA, 18 bp, synthetic construct
  source 1..18: mol_type = other DNA
ctgctcaaacaggtgatg

SEQ ID NO: 30656 - DNA, 18 bp, synthetic construct
  source 1..18: mol_type = other DNA
actgctcaaacaggtgat

SEQ ID NO: 30657 - DNA, 18 bp, synthetic construct
  source 1..18: mol_type = other DNA
cactgctcaaacaggtga

SEQ ID NO: 30658 - DNA, 18 bp, synthetic construct
  source 1..18: mol_type = other DNA
ccactgctcaaacaggtg

SEQ ID NO: 30659 - DNA, 18 bp, synthetic construct
  source 1..18: mol_type = other DNA
tccactgctcaaacaggt

SEQ ID NO: 30660 - DNA, 18 bp, synthetic construct
  source 1..18: mol_type = other DNA
ttccactgctcaaacagg

SEQ ID NO: 30661 - DNA, 18 bp, synthetic construct
  source 1..18: mol_type = other DNA
tttccactgctcaaacag

SEQ ID NO: 30662 - DNA, 18 bp, synthetic construct
  source 1..18: mol_type = other DNA
atttccactgctcaaaca

SEQ ID NO: 30663 - DNA, 18 bp, synthetic construct
  source 1..18: mol_type = other DNA
tatttccactgctcaaac

SEQ ID NO: 30664 - DNA, 18 bp, synthetic construct
  source 1..18: mol_type = other DNA
atatttccactgctcaaa

SEQ ID NO: 30665 - DNA, 18 bp, synthetic construct
  source 1..18: mol_type = other DNA
tatatttccactgctcaa

SEQ ID NO: 30666 - DNA, 18 bp, synthetic construct
  source 1..18: mol_type = other DNA
atatatttccactgctca

SEQ ID NO: 30667 - DNA, 18 bp, synthetic construct
  source 1..18: mol_type = other DNA
tatatatttccactgctc

SEQ ID NO: 30668 - DNA, 18 bp, synthetic construct
  source 1..18: mol_type = other DNA
atatatatttccactgct

SEQ ID NO: 30669 - DNA, 18 bp, synthetic construct
  source 1..18: mol_type = other DNA
gatatatatttccactgc

SEQ ID NO: 30670 - DNA, 18 bp, synthetic construct
  source 1..18: mol_type = other DNA
gggctttgtgatatatat

SEQ ID NO: 30671 - DNA, 18 bp, synthetic construct
  source 1..18: mol_type = other DNA
ggggctttgtgatatata

SEQ ID NO: 30672 - DNA, 18 bp, synthetic construct
  source 1..18: mol_type = other DNA
gggggctttgtgatatat

SEQ ID NO: 30673 - DNA, 18 bp, synthetic construct
  source 1..18: mol_type = other DNA
agggggctttgtgatata

SEQ ID NO: 30674 - DNA, 18 bp, synthetic construct
  source 1..18: mol_type = other DNA
cagggggctttgtgatat

SEQ ID NO: 30675 - DNA, 18 bp, synthetic construct
  source 1..18: mol_type = other DNA
acagggggctttgtgata

SEQ ID NO: 30676 - DNA, 18 bp, synthetic construct
  source 1..18: mol_type = other DNA
tacagggggctttgtgat

SEQ ID NO: 30677 - DNA, 18 bp, synthetic construct
  source 1..18: mol_type = other DNA
ctacagggggctttgtga

SEQ ID NO: 30678 - DNA, 18 bp, synthetic construct
  source 1..18: mol_type = other DNA
tctacagggggctttgtg

SEQ ID NO: 30679 - DNA, 18 bp, synthetic construct
  source 1..18: mol_type = other DNA
gtctacagggggctttgt

SEQ ID NO: 30680 - DNA, 18 bp, synthetic construct
  source 1..18: mol_type = other DNA
tgtctacagggggctttg

SEQ ID NO: 30681 - DNA, 18 bp, synthetic construct
  source 1..18: mol_type = other DNA
ttgtctacagggggcttt

SEQ ID NO: 30682 - DNA, 18 bp, synthetic construct
  source 1..18: mol_type = other DNA
tttgtctacagggggctt

SEQ ID NO: 30683 - DNA, 18 bp, synthetic construct
  source 1..18: mol_type = other DNA
ctttgtctacagggggct

SEQ ID NO: 30684 - DNA, 18 bp, synthetic construct
  source 1..18: mol_type = other DNA
gctttgtctacagggggc

SEQ ID NO: 30685 - DNA, 18 bp, synthetic construct
  source 1..18: mol_type = other DNA
ggctttgtctacaggggg

SEQ ID NO: 30686 - DNA, 18 bp, synthetic construct
  source 1..18: mol_type = other DNA
gggctttgtctacagggg

SEQ ID NO: 30687 - DNA, 18 bp, synthetic construct
  source 1..18: mol_type = other DNA
tgggctttgtctacaggg

SEQ ID NO: 30688 - DNA, 18 bp, synthetic construct
  source 1..18: mol_type = other DNA
ctgggctttgtctacagg

SEQ ID NO: 30689 - DNA, 18 bp, synthetic construct
  source 1..18: mol_type = other DNA
tctgggctttgtctacag

SEQ ID NO: 30690 - DNA, 18 bp, synthetic construct
  source 1..18: mol_type = other DNA
gtctgggctttgtctaca

SEQ ID NO: 30691 - DNA, 18 bp, synthetic construct
  source 1..18: mol_type = other DNA
tgtctgggctttgtctac

SEQ ID NO: 30692 - DNA, 18 bp, synthetic construct
  source 1..18: mol_type = other DNA
ttgtctgggctttgtcta

SEQ ID NO: 30693 - DNA, 18 bp, synthetic construct
  source 1..18: mol_type = other DNA
attgtctgggctttgtct

SEQ ID NO: 30694 - DNA, 18 bp, synthetic construct
  source 1..18: mol_type = other DNA
aattgtctgggctttgtc

SEQ ID NO: 30695 - DNA, 18 bp, synthetic construct
  source 1..18: mol_type = other DNA
aaattgtctgggctttgt

SEQ ID NO: 30696 - DNA, 18 bp, synthetic construct
  source 1..18: mol_type = other DNA
ctcactcaggagatgtaa

SEQ ID NO: 30697 - DNA, 18 bp, synthetic construct
  source 1..18: mol_type = other DNA
gctcactcaggagatgta

SEQ ID NO: 30698 - DNA, 18 bp, synthetic construct
  source 1..18: mol_type = other DNA
tgctcactcaggagatgt

SEQ ID NO: 30699 - DNA, 18 bp, synthetic construct
  source 1..18: mol_type = other DNA
atgctcactcaggagatg

SEQ ID NO: 30700 - DNA, 18 bp, synthetic construct
  source 1..18: mol_type = other DNA
aatgctcactcaggagat

SEQ ID NO: 30701 - DNA, 18 bp, synthetic construct
  source 1..18: mol_type = other DNA
caatgctcactcaggaga

SEQ ID NO: 30702 - DNA, 18 bp, synthetic construct
  source 1..18: mol_type = other DNA
ccaatgctcactcaggag

SEQ ID NO: 30703 - DNA, 18 bp, synthetic construct
  source 1..18: mol_type = other DNA
tccaatgctcactcagga

SEQ ID NO: 30704 - DNA, 18 bp, synthetic construct
  source 1..18: mol_type = other DNA
ctccaatgctcactcagg

SEQ ID NO: 30705 - DNA, 18 bp, synthetic construct
  source 1..18: mol_type = other DNA
tctccaatgctcactcag

SEQ ID NO: 30706 - DNA, 18 bp, synthetic construct
  source 1..18: mol_type = other DNA
ctctccaatgctcactca

SEQ ID NO: 30707 - DNA, 18 bp, synthetic construct
  source 1..18: mol_type = other DNA
tctctccaatgctcactc

SEQ ID NO: 30708 - DNA, 18 bp, synthetic construct
  source 1..18: mol_type = other DNA
atctctccaatgctcact

SEQ ID NO: 30709 - DNA, 18 bp, synthetic construct
  source 1..18: mol_type = other DNA
gatctctccaatgctcac

SEQ ID NO: 30710 - DNA, 18 bp, synthetic construct
  source 1..18: mol_type = other DNA
agatctctccaatgctca

SEQ ID NO: 30711 - DNA, 18 bp, synthetic construct
  source 1..18: mol_type = other DNA
cagatctctccaatgctc

SEQ ID NO: 30712 - DNA, 18 bp, synthetic construct
  source 1..18: mol_type = other DNA
acagatctctccaatgct

SEQ ID NO: 30713 - DNA, 18 bp, synthetic construct
  source 1..18: mol_type = other DNA
gacagatctctccaatgc

SEQ ID NO: 30714 - DNA, 18 bp, synthetic construct
  source 1..18: mol_type = other DNA
tgacagatctctccaatg

SEQ ID NO: 30715 - DNA, 18 bp, synthetic construct
  source 1..18: mol_type = other DNA
gtgacagatctctccaat

SEQ ID NO: 30716 - DNA, 18 bp, synthetic construct
  source 1..18: mol_type = other DNA
tgtgacagatctctccaa

SEQ ID NO: 30717 - DNA, 18 bp, synthetic construct
  source 1..18: mol_type = other DNA
ttgtgacagatctctcca

SEQ ID NO: 30718 - DNA, 18 bp, synthetic construct
  source 1..18: mol_type = other DNA
attgtgacagatctctcc

SEQ ID NO: 30719 - DNA, 18 bp, synthetic construct
  source 1..18: mol_type = other DNA
cattgtgacagatctctc

SEQ ID NO: 30720 - DNA, 18 bp, synthetic construct
  source 1..18: mol_type = other DNA
gcattgtgacagatctct

SEQ ID NO: 30721 - DNA, 18 bp, synthetic construct
  source 1..18: mol_type = other DNA
ggcattgtgacagatctc

SEQ ID NO: 30722 - DNA, 18 bp, synthetic construct
  source 1..18: mol_type = other DNA
gggcattgtgacagatct

SEQ ID NO: 30723 - DNA, 18 bp, synthetic construct
  source 1..18: mol_type = other DNA
ggggcattgtgacagatc

SEQ ID NO: 30724 - DNA, 18 bp, synthetic construct
  source 1..18: mol_type = other DNA
aggggcattgtgacagat

SEQ ID NO: 30725 - DNA, 18 bp, synthetic construct
  source 1..18: mol_type = other DNA
caggggcattgtgacaga

SEQ ID NO: 30726 - DNA, 18 bp, synthetic construct
  source 1..18: mol_type = other DNA
acaggggcattgtgacag

SEQ ID NO: 30727 - DNA, 18 bp, synthetic construct
  source 1..18: mol_type = other DNA
tacaggggcattgtgaca

SEQ ID NO: 30728 - DNA, 18 bp, synthetic construct
  source 1..18: mol_type = other DNA
ctacaggggcattgtgac

SEQ ID NO: 30729 - DNA, 18 bp, synthetic construct
  source 1..18: mol_type = other DNA
cctacaggggcattgtga

SEQ ID NO: 30730 - DNA, 18 bp, synthetic construct
  source 1..18: mol_type = other DNA
gcctacaggggcattgtg

SEQ ID NO: 30731 - DNA, 18 bp, synthetic construct
  source 1..18: mol_type = other DNA
tgcctacaggggcattgt

SEQ ID NO: 30732 - DNA, 18 bp, synthetic construct
  source 1..18: mol_type = other DNA
ctgcctacaggggcattg

SEQ ID NO: 30733 - DNA, 18 bp, synthetic construct
  source 1..18: mol_type = other DNA
tctgcctacaggggcatt

SEQ ID NO: 30734 - DNA, 18 bp, synthetic construct
  source 1..18: mol_type = other DNA
ctctgcctacaggggcat

SEQ ID NO: 30735 - DNA, 18 bp, synthetic construct
  source 1..18: mol_type = other DNA
aagctctgcctacagggg

SEQ ID NO: 30736 - DNA, 18 bp, synthetic construct
  source 1..18: mol_type = other DNA
taagctctgcctacaggg

SEQ ID NO: 30737 - DNA, 18 bp, synthetic construct
  source 1..18: mol_type = other DNA
ctaagctctgcctacagg

SEQ ID NO: 30738 - DNA, 18 bp, synthetic construct
  source 1..18: mol_type = other DNA
tctaagctctgcctacag

SEQ ID NO: 30739 - DNA, 18 bp, synthetic construct
  source 1..18: mol_type = other DNA
gtctaagctctgcctaca

SEQ ID NO: 30740 - DNA, 18 bp, synthetic construct
  source 1..18: mol_type = other DNA
tgtctaagctctgcctac

SEQ ID NO: 30741 - DNA, 18 bp, synthetic construct
  source 1..18: mol_type = other DNA
ttgtctaagctctgccta

SEQ ID NO: 30742 - DNA, 18 bp, synthetic construct
  source 1..18: mol_type = other DNA
cttgtctaagctctgcct

SEQ ID NO: 30743 - DNA, 18 bp, synthetic construct
  source 1..18: mol_type = other DNA
acttgtctaagctctgcc

SEQ ID NO: 30744 - DNA, 18 bp, synthetic construct
  source 1..18: mol_type = other DNA
cacttgtctaagctctgc

SEQ ID NO: 30745 - DNA, 18 bp, synthetic construct
  source 1..18: mol_type = other DNA
acacttgtctaagctctg

SEQ ID NO: 30746 - DNA, 18 bp, synthetic construct
  source 1..18: mol_type = other DNA
aacacttgtctaagctct

SEQ ID NO: 30747 - DNA, 18 bp, synthetic construct
  source 1..18: mol_type = other DNA
taacacttgtctaagctc

SEQ ID NO: 30748 - DNA, 18 bp, synthetic construct
  source 1..18: mol_type = other DNA
gtaacacttgtctaagct

SEQ ID NO: 30749 - DNA, 18 bp, synthetic construct
  source 1..18: mol_type = other DNA
tgtaacacttgtctaagc

SEQ ID NO: 30750 - DNA, 18 bp, synthetic construct
  source 1..18: mol_type = other DNA
gtgatgtaacacttgtct

SEQ ID NO: 30751 - DNA, 18 bp, synthetic construct
  source 1..18: mol_type = other DNA
ggtgatgtaacacttgtc

SEQ ID NO: 30752 - DNA, 18 bp, synthetic construct
  source 1..18: mol_type = other DNA
aggtgatgtaacacttgt

SEQ ID NO: 30753 - DNA, 18 bp, synthetic construct
  source 1..18: mol_type = other DNA
caggtgatgtaacacttg

SEQ ID NO: 30754 - DNA, 18 bp, synthetic construct
  source 1..18: mol_type = other DNA
ccaggtgatgtaacactt

SEQ ID NO: 30755 - DNA, 18 bp, synthetic construct
  source 1..18: mol_type = other DNA
cccaggtgatgtaacact

SEQ ID NO: 30756 - DNA, 18 bp, synthetic construct
  source 1..18: mol_type = other DNA
acccaggtgatgtaacac

SEQ ID NO: 30757 - DNA, 18 bp, synthetic construct
  source 1..18: mol_type = other DNA
cacccaggtgatgtaaca

SEQ ID NO: 30758 - DNA, 18 bp, synthetic construct
  source 1..18: mol_type = other DNA
tcacccaggtgatgtaac

SEQ ID NO: 30759 - DNA, 18 bp, synthetic construct
  source 1..18: mol_type = other DNA
atcacccaggtgatgtaa

SEQ ID NO: 30760 - DNA, 18 bp, synthetic construct
  source 1..18: mol_type = other DNA
gatcacccaggtgatgta

SEQ ID NO: 30761 - DNA, 18 bp, synthetic construct
  source 1..18: mol_type = other DNA
tgatcacccaggtgatgt

SEQ ID NO: 30762 - DNA, 18 bp, synthetic construct
  source 1..18: mol_type = other DNA
ctgatcacccaggtgatg

SEQ ID NO: 30763 - DNA, 18 bp, synthetic construct
  source 1..18: mol_type = other DNA
actgatcacccaggtgat

SEQ ID NO: 30764 - DNA, 18 bp, synthetic construct
  source 1..18: mol_type = other DNA
cactgatcacccaggtga

SEQ ID NO: 30765 - DNA, 18 bp, synthetic construct
  source 1..18: mol_type = other DNA
gcactgatcacccaggtg

SEQ ID NO: 30766 - DNA, 18 bp, synthetic construct
  source 1..18: mol_type = other DNA
tgcactgatcacccaggt

SEQ ID NO: 30767 - DNA, 18 bp, synthetic construct
  source 1..18: mol_type = other DNA
ctgcactgatcacccagg

SEQ ID NO: 30768 - DNA, 18 bp, synthetic construct
  source 1..18: mol_type = other DNA
tctgcactgatcacccag

SEQ ID NO: 30769 - DNA, 18 bp, synthetic construct
  source 1..18: mol_type = other DNA
ctctgcactgatcaccca

SEQ ID NO: 30770 - DNA, 18 bp, synthetic construct
  source 1..18: mol_type = other DNA
tctctgcactgatcaccc

SEQ ID NO: 30771 - DNA, 18 bp, synthetic construct
  source 1..18: mol_type = other DNA
atctctgcactgatcacc

SEQ ID NO: 30772 - DNA, 18 bp, synthetic construct
  source 1..18: mol_type = other DNA
catctctgcactgatcac

SEQ ID NO: 30773 - DNA, 18 bp, synthetic construct
  source 1..18: mol_type = other DNA
acatctctgcactgatca

SEQ ID NO: 30774 - DNA, 18 bp, synthetic construct
  source 1..18: mol_type = other DNA
cacatctctgcactgatc

SEQ ID NO: 30775 - DNA, 18 bp, synthetic construct
  source 1..18: mol_type = other DNA
acacatctctgcactgat

SEQ ID NO: 30776 - DNA, 18 bp, synthetic construct
  source 1..18: mol_type = other DNA
gacacatctctgcactga

SEQ ID NO: 30777 - DNA, 18 bp, synthetic construct
  source 1..18: mol_type = other DNA
tgacacatctctgcactg

SEQ ID NO: 30778 - DNA, 18 bp, synthetic construct
  source 1..18: mol_type = other DNA
tacaggagcgttttgaca

SEQ ID NO: 30779 - DNA, 18 bp, synthetic construct
  source 1..18: mol_type = other DNA
ctacaggagcgttttgac

SEQ ID NO: 30780 - DNA, 18 bp, synthetic construct
  source 1..18: mol_type = other DNA
actacaggagcgttttga

SEQ ID NO: 30781 - DNA, 18 bp, synthetic construct
  source 1..18: mol_type = other DNA
gactacaggagcgttttg

SEQ ID NO: 30782 - DNA, 18 bp, synthetic construct
  source 1..18: mol_type = other DNA
agactacaggagcgtttt

SEQ ID NO: 30783 - DNA, 18 bp, synthetic construct
  source 1..18: mol_type = other DNA
cagactacaggagcgttt

SEQ ID NO: 30784 - DNA, 18 bp, synthetic construct
  source 1..18: mol_type = other DNA
tcagactacaggagcgtt

SEQ ID NO: 30785 - DNA, 18 bp, synthetic construct
  source 1..18: mol_type = other DNA
ttcagactacaggagcgt

SEQ ID NO: 30786 - DNA, 18 bp, synthetic construct
  source 1..18: mol_type = other DNA
gttcagactacaggagcg

SEQ ID NO: 30787 - DNA, 18 bp, synthetic construct
  source 1..18: mol_type = other DNA
ggttcagactacaggagc

SEQ ID NO: 30788 - DNA, 18 bp, synthetic construct
  source 1..18: mol_type = other DNA
aggttcagactacaggag

SEQ ID NO: 30789 - DNA, 18 bp, synthetic construct
  source 1..18: mol_type = other DNA
taggttcagactacagga

SEQ ID NO: 30790 - DNA, 18 bp, synthetic construct
  source 1..18: mol_type = other DNA
ctaggttcagactacagg

SEQ ID NO: 30791 - DNA, 18 bp, synthetic construct
  source 1..18: mol_type = other DNA
tctaggttcagactacag

SEQ ID NO: 30792 - DNA, 18 bp, synthetic construct
  source 1..18: mol_type = other DNA
gtctaggttcagactaca

SEQ ID NO: 30793 - DNA, 18 bp, synthetic construct
  source 1..18: mol_type = other DNA
tgtctaggttcagactac

SEQ ID NO: 30794 - DNA, 18 bp, synthetic construct
  source 1..18: mol_type = other DNA
ctgtctaggttcagacta

SEQ ID NO: 30795 - DNA, 18 bp, synthetic construct
  source 1..18: mol_type = other DNA
cctgtctaggttcagact

SEQ ID NO: 30796 - DNA, 18 bp, synthetic construct
  source 1..18: mol_type = other DNA
tcctgtctaggttcagac

SEQ ID NO: 30797 - DNA, 18 bp, synthetic construct
  source 1..18: mol_type = other DNA
ctcctgtctaggttcaga

SEQ ID NO: 30798 - DNA, 18 bp, synthetic construct
  source 1..18: mol_type = other DNA
actcctgtctaggttcag

SEQ ID NO: 30799 - DNA, 18 bp, synthetic construct
  source 1..18: mol_type = other DNA
aactcctgtctaggttca

SEQ ID NO: 30800 - DNA, 18 bp, synthetic construct
  source 1..18: mol_type = other DNA
taactcctgtctaggttc

SEQ ID NO: 30801 - DNA, 18 bp, synthetic construct
  source 1..18: mol_type = other DNA
gtaactcctgtctaggtt

SEQ ID NO: 30802 - DNA, 18 bp, synthetic construct
  source 1..18: mol_type = other DNA
tgtaactcctgtctaggt

SEQ ID NO: 30803 - DNA, 18 bp, synthetic construct
  source 1..18: mol_type = other DNA
atgtaactcctgtctagg

SEQ ID NO: 30804 - DNA, 18 bp, synthetic construct
  source 1..18: mol_type = other DNA
gatgtaactcctgtctag

SEQ ID NO: 30805 - DNA, 18 bp, synthetic construct
  source 1..18: mol_type = other DNA
tgatgtaactcctgtcta

SEQ ID NO: 30806 - DNA, 18 bp, synthetic construct
  source 1..18: mol_type = other DNA
gtgatgtaactcctgtct

SEQ ID NO: 30807 - DNA, 18 bp, synthetic construct
  source 1..18: mol_type = other DNA
ggtgatgtaactcctgtc

SEQ ID NO: 30808 - DNA, 18 bp, synthetic construct
  source 1..18: mol_type = other DNA
aggtgatgtaactcctgt

SEQ ID NO: 30809 - DNA, 18 bp, synthetic construct
  source 1..18: mol_type = other DNA
aaggtgatgtaactcctg

SEQ ID NO: 30810 - DNA, 18 bp, synthetic construct
  source 1..18: mol_type = other DNA
caaggtgatgtaactcct

SEQ ID NO: 30811 - DNA, 18 bp, synthetic construct
  source 1..18: mol_type = other DNA
ccaaggtgatgtaactcc

SEQ ID NO: 30812 - DNA, 18 bp, synthetic construct
  source 1..18: mol_type = other DNA
cccaaggtgatgtaactc

SEQ ID NO: 30813 - DNA, 18 bp, synthetic construct
  source 1..18: mol_type = other DNA
ccccaaggtgatgtaact

SEQ ID NO: 30814 - DNA, 18 bp, synthetic construct
  source 1..18: mol_type = other DNA
tccccaaggtgatgtaac

SEQ ID NO: 30815 - DNA, 18 bp, synthetic construct
  source 1..18: mol_type = other DNA
atccccaaggtgatgtaa

SEQ ID NO: 30816 - DNA, 18 bp, synthetic construct
  source 1..18: mol_type = other DNA
gatccccaaggtgatgta

SEQ ID NO: 30817 - DNA, 18 bp, synthetic construct
  source 1..18: mol_type = other DNA
tgatccccaaggtgatgt

SEQ ID NO: 30818 - DNA, 18 bp, synthetic construct
  source 1..18: mol_type = other DNA
ctgatccccaaggtgatg

SEQ ID NO: 30819 - DNA, 18 bp, synthetic construct
  source 1..18: mol_type = other DNA
actgatccccaaggtgat

SEQ ID NO: 30820 - DNA, 18 bp, synthetic construct
  source 1..18: mol_type = other DNA
cactgatccccaaggtga

SEQ ID NO: 30821 - DNA, 18 bp, synthetic construct
  source 1..18: mol_type = other DNA
gcactgatccccaaggtg

SEQ ID NO: 30822 - DNA, 18 bp, synthetic construct
  source 1..18: mol_type = other DNA
tgcactgatccccaaggt

SEQ ID NO: 30823 - DNA, 18 bp, synthetic construct
  source 1..18: mol_type = other DNA
ctgcactgatccccaagg

SEQ ID NO: 30824 - DNA, 18 bp, synthetic construct
  source 1..18: mol_type = other DNA
tctgcactgatccccaag

SEQ ID NO: 30825 - DNA, 18 bp, synthetic construct
  source 1..18: mol_type = other DNA
ctctgcactgatccccaa

SEQ ID NO: 30826 - DNA, 18 bp, synthetic construct
  source 1..18: mol_type = other DNA
tctctgcactgatcccca

SEQ ID NO: 30827 - DNA, 18 bp, synthetic construct
  source 1..18: mol_type = other DNA
atctctgcactgatcccc

SEQ ID NO: 30828 - DNA, 18 bp, synthetic construct
  source 1..18: mol_type = other DNA
tatctctgcactgatccc

SEQ ID NO: 30829 - DNA, 18 bp, synthetic construct
  source 1..18: mol_type = other DNA
gtatctctgcactgatcc

SEQ ID NO: 30830 - DNA, 18 bp, synthetic construct
  source 1..18: mol_type = other DNA
cgtatctctgcactgatc

SEQ ID NO: 30831 - DNA, 18 bp, synthetic construct
  source 1..18: mol_type = other DNA
acgtatctctgcactgat

SEQ ID NO: 30832 - DNA, 18 bp, synthetic construct
  source 1..18: mol_type = other DNA
cacgtatctctgcactga

SEQ ID NO: 30833 - DNA, 18 bp, synthetic construct
  source 1..18: mol_type = other DNA
tcacgtatctctgcactg

SEQ ID NO: 30834 - DNA, 18 bp, synthetic construct
  source 1..18: mol_type = other DNA
ctcacgtatctctgcact

SEQ ID NO: 30835 - DNA, 18 bp, synthetic construct
  source 1..18: mol_type = other DNA
tctcacgtatctctgcac

SEQ ID NO: 30836 - DNA, 18 bp, synthetic construct
  source 1..18: mol_type = other DNA
ttctcacgtatctctgca

SEQ ID NO: 30837 - DNA, 18 bp, synthetic construct
  source 1..18: mol_type = other DNA
attctcacgtatctctgc

SEQ ID NO: 30838 - DNA, 18 bp, synthetic construct
  source 1..18: mol_type = other DNA
aattctcacgtatctctg

SEQ ID NO: 30839 - DNA, 18 bp, synthetic construct
  source 1..18: mol_type = other DNA
gaattctcacgtatctct

SEQ ID NO: 30840 - DNA, 18 bp, synthetic construct
  source 1..18: mol_type = other DNA
ggaattctcacgtatctc

SEQ ID NO: 30841 - DNA, 18 bp, synthetic construct
  source 1..18: mol_type = other DNA
gggaattctcacgtatct

SEQ ID NO: 30842 - DNA, 18 bp, synthetic construct
  source 1..18: mol_type = other DNA
agggaattctcacgtatc

SEQ ID NO: 30843 - DNA, 18 bp, synthetic construct
  source 1..18: mol_type = other DNA
aagggaattctcacgtat

SEQ ID NO: 30844 - DNA, 18 bp, synthetic construct
  source 1..18: mol_type = other DNA
caagggaattctcacgta

SEQ ID NO: 30845 - DNA, 18 bp, synthetic construct
  source 1..18: mol_type = other DNA
acaagggaattctcacgt

SEQ ID NO: 30846 - DNA, 18 bp, synthetic construct
  source 1..18: mol_type = other DNA
ctacaagggaattctcac

SEQ ID NO: 30847 - DNA, 18 bp, synthetic construct
  source 1..18: mol_type = other DNA
cctacaagggaattctca

SEQ ID NO: 30848 - DNA, 18 bp, synthetic construct
  source 1..18: mol_type = other DNA
gcctacaagggaattctc

SEQ ID NO: 30849 - DNA, 18 bp, synthetic construct
  source 1..18: mol_type = other DNA
tgcctacaagggaattct

SEQ ID NO: 30850 - DNA, 18 bp, synthetic construct
  source 1..18: mol_type = other DNA
ctgcctacaagggaattc

SEQ ID NO: 30851 - DNA, 18 bp, synthetic construct
  source 1..18: mol_type = other DNA
cctgcctacaagggaatt

SEQ ID NO: 30852 - DNA, 18 bp, synthetic construct
  source 1..18: mol_type = other DNA
ccctgcctacaagggaat

SEQ ID NO: 30853 - DNA, 18 bp, synthetic construct
  source 1..18: mol_type = other DNA
gccctgcctacaagggaa

SEQ ID NO: 30854 - DNA, 18 bp, synthetic construct
  source 1..18: mol_type = other DNA
aggccctgcctacaaggg

SEQ ID NO: 30855 - DNA, 18 bp, synthetic construct
  source 1..18: mol_type = other DNA
taggccctgcctacaagg

SEQ ID NO: 30856 - DNA, 18 bp, synthetic construct
  source 1..18: mol_type = other DNA
ctaggccctgcctacaag

SEQ ID NO: 30857 - DNA, 18 bp, synthetic construct
  source 1..18: mol_type = other DNA
tctaggccctgcctacaa

SEQ ID NO: 30858 - DNA, 18 bp, synthetic construct
  source 1..18: mol_type = other DNA
cacttgtctaggccctgc

SEQ ID NO: 30859 - DNA, 18 bp, synthetic construct
  source 1..18: mol_type = other DNA
acacttgtctaggccctg

SEQ ID NO: 30860 - DNA, 18 bp, synthetic construct
  source 1..18: mol_type = other DNA
aacacttgtctaggccct

SEQ ID NO: 30861 - DNA, 18 bp, synthetic construct
  source 1..18: mol_type = other DNA
taacacttgtctaggccc

SEQ ID NO: 30862 - DNA, 18 bp, synthetic construct
  source 1..18: mol_type = other DNA
gtaacacttgtctaggcc

SEQ ID NO: 30863 - DNA, 18 bp, synthetic construct
  source 1..18: mol_type = other DNA
tgtaacacttgtctaggc

SEQ ID NO: 30864 - DNA, 18 bp, synthetic construct
  source 1..18: mol_type = other DNA
atgtaacacttgtctagg

SEQ ID NO: 30865 - DNA, 18 bp, synthetic construct
  source 1..18: mol_type = other DNA
ctaggtgatgtaacactt

SEQ ID NO: 30866 - DNA, 18 bp, synthetic construct
  source 1..18: mol_type = other DNA
cctaggtgatgtaacact

SEQ ID NO: 30867 - DNA, 18 bp, synthetic construct
  source 1..18: mol_type = other DNA
acctaggtgatgtaacac

SEQ ID NO: 30868 - DNA, 18 bp, synthetic construct
  source 1..18: mol_type = other DNA
aacctaggtgatgtaaca

SEQ ID NO: 30869 - DNA, 18 bp, synthetic construct
  source 1..18: mol_type = other DNA
gataacctaggtgatgta

SEQ ID NO: 30870 - DNA, 18 bp, synthetic construct
  source 1..18: mol_type = other DNA
tgataacctaggtgatgt

SEQ ID NO: 30871 - DNA, 18 bp, synthetic construct
  source 1..18: mol_type = other DNA
ctgataacctaggtgatg

SEQ ID NO: 30872 - DNA, 18 bp, synthetic construct
  source 1..18: mol_type = other DNA
actgataacctaggtgat

SEQ ID NO: 30873 - DNA, 18 bp, synthetic construct
  source 1..18: mol_type = other DNA
cactgataacctaggtga

SEQ ID NO: 30874 - DNA, 18 bp, synthetic construct
  source 1..18: mol_type = other DNA
gcactgataacctaggtg

SEQ ID NO: 30875 - DNA, 18 bp, synthetic construct
  source 1..18: mol_type = other DNA
tgcactgataacctaggt

SEQ ID NO: 30876 - DNA, 18 bp, synthetic construct
  source 1..18: mol_type = other DNA
ctgcactgataacctagg

SEQ ID NO: 30877 - DNA, 18 bp, synthetic construct
  source 1..18: mol_type = other DNA
tctgcactgataacctag

SEQ ID NO: 30878 - DNA, 18 bp, synthetic construct
  source 1..18: mol_type = other DNA
ctctgcactgataaccta

SEQ ID NO: 30879 - DNA, 18 bp, synthetic construct
  source 1..18: mol_type = other DNA
tctctgcactgataacct

SEQ ID NO: 30880 - DNA, 18 bp, synthetic construct
  source 1..18: mol_type = other DNA
atctctgcactgataacc

SEQ ID NO: 30881 - DNA, 18 bp, synthetic construct
  source 1..18: mol_type = other DNA
tatctctgcactgataac

SEQ ID NO: 30882 - DNA, 18 bp, synthetic construct
  source 1..18: mol_type = other DNA
catatctctgcactgata

SEQ ID NO: 30883 - DNA, 18 bp, synthetic construct
  source 1..18: mol_type = other DNA
acatatctctgcactgat

SEQ ID NO: 30884 - DNA, 18 bp, synthetic construct
  source 1..18: mol_type = other DNA
cacatatctctgcactga

SEQ ID NO: 30885 - DNA, 18 bp, synthetic construct
  source 1..18: mol_type = other DNA
tcacatatctctgcactg

SEQ ID NO: 30886 - DNA, 18 bp, synthetic construct
  source 1..18: mol_type = other DNA
ctcacatatctctgcact

SEQ ID NO: 30887 - DNA, 18 bp, synthetic construct
  source 1..18: mol_type = other DNA
tctcacatatctctgcac

SEQ ID NO: 30888 - DNA, 18 bp, synthetic construct
  source 1..18: mol_type = other DNA
ttctcacatatctctgca

SEQ ID NO: 30889 - DNA, 18 bp, synthetic construct
  source 1..18: mol_type = other DNA
attctcacatatctctgc

SEQ ID NO: 30890 - DNA, 18 bp, synthetic construct
  source 1..18: mol_type = other DNA
gaattctcacatatctct

SEQ ID NO: 30891 - DNA, 18 bp, synthetic construct
  source 1..18: mol_type = other DNA
ggaattctcacatatctc

SEQ ID NO: 30892 - DNA, 18 bp, synthetic construct
  source 1..18: mol_type = other DNA
gggaattctcacatatct

SEQ ID NO: 30893 - DNA, 18 bp, synthetic construct
  source 1..18: mol_type = other DNA
cgggaattctcacatatc

SEQ ID NO: 30894 - DNA, 18 bp, synthetic construct
  source 1..18: mol_type = other DNA
acgggaattctcacatat

SEQ ID NO: 30895 - DNA, 18 bp, synthetic construct
  source 1..18: mol_type = other DNA
cacgggaattctcacata

SEQ ID NO: 30896 - DNA, 18 bp, synthetic construct
  source 1..18: mol_type = other DNA
acacgggaattctcacat

SEQ ID NO: 30897 - DNA, 18 bp, synthetic construct
  source 1..18: mol_type = other DNA
tacacgggaattctcaca

SEQ ID NO: 30898 - DNA, 18 bp, synthetic construct
  source 1..18: mol_type = other DNA
ctacacgggaattctcac

SEQ ID NO: 30899 - DNA, 18 bp, synthetic construct
  source 1..18: mol_type = other DNA
cctacacgggaattctca

SEQ ID NO: 30900 - DNA, 18 bp, synthetic construct
  source 1..18: mol_type = other DNA
gcctacacgggaattctc

SEQ ID NO: 30901 - DNA, 18 bp, synthetic construct
  source 1..18: mol_type = other DNA
tgcctacacgggaattct

SEQ ID NO: 30902 - DNA, 18 bp, synthetic construct
  source 1..18: mol_type = other DNA
ctgcctacacgggaattc

SEQ ID NO: 30903 - DNA, 18 bp, synthetic construct
  source 1..18: mol_type = other DNA
tctgcctacacgggaatt

SEQ ID NO: 30904 - DNA, 18 bp, synthetic construct
  source 1..18: mol_type = other DNA
ctctgcctacacgggaat

SEQ ID NO: 30905 - DNA, 18 bp, synthetic construct
  source 1..18: mol_type = other DNA
gctctgcctacacgggaa

SEQ ID NO: 30906 - DNA, 18 bp, synthetic construct
  source 1..18: mol_type = other DNA
ggctctgcctacacggga

SEQ ID NO: 30907 - DNA, 18 bp, synthetic construct
  source 1..18: mol_type = other DNA
aggctctgcctacacggg

SEQ ID NO: 30908 - DNA, 18 bp, synthetic construct
  source 1..18: mol_type = other DNA
taggctctgcctacacgg

SEQ ID NO: 30909 - DNA, 18 bp, synthetic construct
  source 1..18: mol_type = other DNA
ctaggctctgcctacacg

SEQ ID NO: 30910 - DNA, 18 bp, synthetic construct
  source 1..18: mol_type = other DNA
tctaggctctgcctacac

SEQ ID NO: 30911 - DNA, 18 bp, synthetic construct
  source 1..18: mol_type = other DNA
gtctaggctctgcctaca

SEQ ID NO: 30912 - DNA, 18 bp, synthetic construct
  source 1..18: mol_type = other DNA
tgtctaggctctgcctac

SEQ ID NO: 30913 - DNA, 18 bp, synthetic construct
  source 1..18: mol_type = other DNA
ttgtctaggctctgccta

SEQ ID NO: 30914 - DNA, 18 bp, synthetic construct
  source 1..18: mol_type = other DNA
cttgtctaggctctgcct

SEQ ID NO: 30915 - DNA, 18 bp, synthetic construct
  source 1..18: mol_type = other DNA
acttgtctaggctctgcc

SEQ ID NO: 30916 - DNA, 18 bp, synthetic construct
  source 1..18: mol_type = other DNA
cacttgtctaggctctgc

SEQ ID NO: 30917 - DNA, 18 bp, synthetic construct
  source 1..18: mol_type = other DNA
acacttgtctaggctctg

SEQ ID NO: 30918 - DNA, 18 bp, synthetic construct
  source 1..18: mol_type = other DNA
aacacttgtctaggctct

SEQ ID NO: 30919 - DNA, 18 bp, synthetic construct
  source 1..18: mol_type = other DNA
taacacttgtctaggctc

SEQ ID NO: 30920 - DNA, 18 bp, synthetic construct
  source 1..18: mol_type = other DNA
gtaacacttgtctaggct

SEQ ID NO: 30921 - DNA, 18 bp, synthetic construct
  source 1..18: mol_type = other DNA
actaggtgatgtaacact

SEQ ID NO: 30922 - DNA, 18 bp, synthetic construct
  source 1..18: mol_type = other DNA
ggaggctttatgactaat

SEQ ID NO: 30923 - DNA, 18 bp, synthetic construct
  source 1..18: mol_type = other DNA
aggaggctttatgactaa

SEQ ID NO: 30924 - DNA, 18 bp, synthetic construct
  source 1..18: mol_type = other DNA
caggaggctttatgacta

SEQ ID NO: 30925 - DNA, 18 bp, synthetic construct
  source 1..18: mol_type = other DNA
agggaactcttgtctacg

SEQ ID NO: 30926 - DNA, 18 bp, synthetic construct
  source 1..18: mol_type = other DNA
gagggaactcttgtctac

SEQ ID NO: 30927 - DNA, 18 bp, synthetic construct
  source 1..18: mol_type = other DNA
ggagggaactcttgtcta

SEQ ID NO: 30928 - DNA, 18 bp, synthetic construct
  source 1..18: mol_type = other DNA
aggagggaactcttgtct

SEQ ID NO: 30929 - DNA, 18 bp, synthetic construct
  source 1..18: mol_type = other DNA
gaggagggaactcttgtc

SEQ ID NO: 30930 - DNA, 18 bp, synthetic construct
  source 1..18: mol_type = other DNA
tgaggagggaactcttgt

SEQ ID NO: 30931 - DNA, 18 bp, synthetic construct
  source 1..18: mol_type = other DNA
ctgaggagggaactcttg

SEQ ID NO: 30932 - DNA, 18 bp, synthetic construct
  source 1..18: mol_type = other DNA
cctgaggagggaactctt

SEQ ID NO: 30933 - DNA, 18 bp, synthetic construct
  source 1..18: mol_type = other DNA
ccctgaggagggaactct

SEQ ID NO: 30934 - DNA, 18 bp, synthetic construct
  source 1..18: mol_type = other DNA
accctgaggagggaactc

SEQ ID NO: 30935 - DNA, 18 bp, synthetic construct
  source 1..18: mol_type = other DNA
caccctgaggagggaact

SEQ ID NO: 30936 - DNA, 18 bp, synthetic construct
  source 1..18: mol_type = other DNA
tcaccctgaggagggaac

SEQ ID NO: 30937 - DNA, 18 bp, synthetic construct
  source 1..18: mol_type = other DNA
atcaccctgaggagggaa

SEQ ID NO: 30938 - DNA, 18 bp, synthetic construct
  source 1..18: mol_type = other DNA
gatcaccctgaggaggga

SEQ ID NO: 30939 - DNA, 18 bp, synthetic construct
  source 1..18: mol_type = other DNA
tgatcaccctgaggaggg

SEQ ID NO: 30940 - DNA, 18 bp, synthetic construct
  source 1..18: mol_type = other DNA
ctgatcaccctgaggagg

SEQ ID NO: 30941 - DNA, 18 bp, synthetic construct
  source 1..18: mol_type = other DNA
actgatcaccctgaggag

SEQ ID NO: 30942 - DNA, 18 bp, synthetic construct
  source 1..18: mol_type = other DNA
cactgatcaccctgagga

SEQ ID NO: 30943 - DNA, 18 bp, synthetic construct
  source 1..18: mol_type = other DNA
gcactgatcaccctgagg

SEQ ID NO: 30944 - DNA, 18 bp, synthetic construct
  source 1..18: mol_type = other DNA
tgcactgatcaccctgag

SEQ ID NO: 30945 - DNA, 18 bp, synthetic construct
  source 1..18: mol_type = other DNA
ctgcactgatcaccctga

SEQ ID NO: 30946 - DNA, 18 bp, synthetic construct
  source 1..18: mol_type = other DNA
tctgcactgatcaccctg

SEQ ID NO: 30947 - DNA, 18 bp, synthetic construct
  source 1..18: mol_type = other DNA
ctctgcactgatcaccct

SEQ ID NO: 30948 - DNA, 18 bp, synthetic construct
  source 1..18: mol_type = other DNA
gtgacacatctctgcact

SEQ ID NO: 30949 - DNA, 18 bp, synthetic construct
  source 1..18: mol_type = other DNA
tgtgacacatctctgcac

SEQ ID NO: 30950 - DNA, 18 bp, synthetic construct
  source 1..18: mol_type = other DNA
ttgtgacacatctctgca

SEQ ID NO: 30951 - DNA, 18 bp, synthetic construct
  source 1..18: mol_type = other DNA
tttgtgacacatctctgc

SEQ ID NO: 30952 - DNA, 18 bp, synthetic construct
  source 1..18: mol_type = other DNA
ctttgtgacacatctctg

SEQ ID NO: 30953 - DNA, 18 bp, synthetic construct
  source 1..18: mol_type = other DNA
gctttgtgacacatctct

SEQ ID NO: 30954 - DNA, 18 bp, synthetic construct
  source 1..18: mol_type = other DNA
ggctttgtgacacatctc

SEQ ID NO: 30955 - DNA, 18 bp, synthetic construct
  source 1..18: mol_type = other DNA
gggctttgtgacacatct

SEQ ID NO: 30956 - DNA, 18 bp, synthetic construct
  source 1..18: mol_type = other DNA
ggggctttgtgacacatc

SEQ ID NO: 30957 - DNA, 18 bp, synthetic construct
  source 1..18: mol_type = other DNA
aggggctttgtgacacat

SEQ ID NO: 30958 - DNA, 18 bp, synthetic construct
  source 1..18: mol_type = other DNA
caggggctttgtgacaca

SEQ ID NO: 30959 - DNA, 18 bp, synthetic construct
  source 1..18: mol_type = other DNA
acaggggctttgtgacac

SEQ ID NO: 30960 - DNA, 18 bp, synthetic construct
  source 1..18: mol_type = other DNA
tacaggggctttgtgaca

SEQ ID NO: 30961 - DNA, 18 bp, synthetic construct
  source 1..18: mol_type = other DNA
ctacaggggctttgtgac

SEQ ID NO: 30962 - DNA, 18 bp, synthetic construct
  source 1..18: mol_type = other DNA
cctacaggggctttgtga

SEQ ID NO: 30963 - DNA, 18 bp, synthetic construct
  source 1..18: mol_type = other DNA
gcctacaggggctttgtg

SEQ ID NO: 30964 - DNA, 18 bp, synthetic construct
  source 1..18: mol_type = other DNA
tgcctacaggggctttgt

SEQ ID NO: 30965 - DNA, 18 bp, synthetic construct
  source 1..18: mol_type = other DNA
ctgcctacaggggctttg

SEQ ID NO: 30966 - DNA, 18 bp, synthetic construct
  source 1..18: mol_type = other DNA
tctgcctacaggggcttt

SEQ ID NO: 30967 - DNA, 18 bp, synthetic construct
  source 1..18: mol_type = other DNA
taggctctgcctacaggg

SEQ ID NO: 30968 - DNA, 18 bp, synthetic construct
  source 1..18: mol_type = other DNA
ctaggctctgcctacagg

SEQ ID NO: 30969 - DNA, 18 bp, synthetic construct
  source 1..18: mol_type = other DNA
tctaggctctgcctacag

SEQ ID NO: 30970 - DNA, 18 bp, synthetic construct
  source 1..18: mol_type = other DNA
tcttgtctaggctctgcc

SEQ ID NO: 30971 - DNA, 18 bp, synthetic construct
  source 1..18: mol_type = other DNA
ctcttgtctaggctctgc

SEQ ID NO: 30972 - DNA, 18 bp, synthetic construct
  source 1..18: mol_type = other DNA
actcttgtctaggctctg

SEQ ID NO: 30973 - DNA, 18 bp, synthetic construct
  source 1..18: mol_type = other DNA
aactcttgtctaggctct

SEQ ID NO: 30974 - DNA, 18 bp, synthetic construct
  source 1..18: mol_type = other DNA
aaactcttgtctaggctc

SEQ ID NO: 30975 - DNA, 18 bp, synthetic construct
  source 1..18: mol_type = other DNA
gaaactcttgtctaggct

SEQ ID NO: 30976 - DNA, 18 bp, synthetic construct
  source 1..18: mol_type = other DNA
tgaaactcttgtctaggc

SEQ ID NO: 30977 - DNA, 18 bp, synthetic construct
  source 1..18: mol_type = other DNA
gtgatgaaactcttgtct

SEQ ID NO: 30978 - DNA, 18 bp, synthetic construct
  source 1..18: mol_type = other DNA
actgatcaaccaagtgat

SEQ ID NO: 30979 - DNA, 18 bp, synthetic construct
  source 1..18: mol_type = other DNA
ctctgaactgatcaacca

SEQ ID NO: 30980 - DNA, 18 bp, synthetic construct
  source 1..18: mol_type = other DNA
tctctgaactgatcaacc

SEQ ID NO: 30981 - DNA, 18 bp, synthetic construct
  source 1..18: mol_type = other DNA
acatctctgaactgatca

SEQ ID NO: 30982 - DNA, 18 bp, synthetic construct
  source 1..18: mol_type = other DNA
cacatctctgaactgatc

SEQ ID NO: 30983 - DNA, 18 bp, synthetic construct
  source 1..18: mol_type = other DNA
acacatctctgaactgat

SEQ ID NO: 30984 - DNA, 18 bp, synthetic construct
  source 1..18: mol_type = other DNA
gacacatctctgaactga

SEQ ID NO: 30985 - DNA, 18 bp, synthetic construct
  source 1..18: mol_type = other DNA
tgacacatctctgaactg

SEQ ID NO: 30986 - DNA, 18 bp, synthetic construct
  source 1..18: mol_type = other DNA
ctgacacatctctgaact

SEQ ID NO: 30987 - DNA, 18 bp, synthetic construct
  source 1..18: mol_type = other DNA
tctgacacatctctgaac

SEQ ID NO: 30988 - DNA, 18 bp, synthetic construct
  source 1..18: mol_type = other DNA
ttctgacacatctctgaa

SEQ ID NO: 30989 - DNA, 18 bp, synthetic construct
  source 1..18: mol_type = other DNA
attctgacacatctctga

SEQ ID NO: 30990 - DNA, 18 bp, synthetic construct
  source 1..18: mol_type = other DNA
cattctgacacatctctg

SEQ ID NO: 30991 - DNA, 18 bp, synthetic construct
  source 1..18: mol_type = other DNA
gcattctgacacatctct

SEQ ID NO: 30992 - DNA, 18 bp, synthetic construct
  source 1..18: mol_type = other DNA
ggcattctgacacatctc

SEQ ID NO: 30993 - DNA, 18 bp, synthetic construct
  source 1..18: mol_type = other DNA
gggcattctgacacatct

SEQ ID NO: 30994 - DNA, 18 bp, synthetic construct
  source 1..18: mol_type = other DNA
tgggcattctgacacatc

SEQ ID NO: 30995 - DNA, 18 bp, synthetic construct
  source 1..18: mol_type = other DNA
atgggcattctgacacat

SEQ ID NO: 30996 - DNA, 18 bp, synthetic construct
  source 1..18: mol_type = other DNA
catgggcattctgacaca

SEQ ID NO: 30997 - DNA, 18 bp, synthetic construct
  source 1..18: mol_type = other DNA
acatgggcattctgacac

SEQ ID NO: 30998 - DNA, 18 bp, synthetic construct
  source 1..18: mol_type = other DNA
tacatgggcattctgaca

SEQ ID NO: 30999 - DNA, 18 bp, synthetic construct
  source 1..18: mol_type = other DNA
ctacatgggcattctgac

SEQ ID NO: 31000 - DNA, 18 bp, synthetic construct
  source 1..18: mol_type = other DNA
cctacatgggcattctga

SEQ ID NO: 31001 - DNA, 18 bp, synthetic construct
  source 1..18: mol_type = other DNA
gcctacatgggcattctg

SEQ ID NO: 31002 - DNA, 18 bp, synthetic construct
  source 1..18: mol_type = other DNA
tgcctacatgggcattct

SEQ ID NO: 31003 - DNA, 18 bp, synthetic construct
  source 1..18: mol_type = other DNA
ctgcctacatgggcattc

SEQ ID NO: 31004 - DNA, 18 bp, synthetic construct
  source 1..18: mol_type = other DNA
tctgcctacatgggcatt

SEQ ID NO: 31005 - DNA, 18 bp, synthetic construct
  source 1..18: mol_type = other DNA
atctgcctacatgggcat

SEQ ID NO: 31006 - DNA, 18 bp, synthetic construct
  source 1..18: mol_type = other DNA
gatctgcctacatgggca

SEQ ID NO: 31007 - DNA, 18 bp, synthetic construct
  source 1..18: mol_type = other DNA
agatctgcctacatgggc

SEQ ID NO: 31008 - DNA, 18 bp, synthetic construct
  source 1..18: mol_type = other DNA
tagatctgcctacatggg

SEQ ID NO: 31009 - DNA, 18 bp, synthetic construct
  source 1..18: mol_type = other DNA
ttagatctgcctacatgg

SEQ ID NO: 31010 - DNA, 18 bp, synthetic construct
  source 1..18: mol_type = other DNA
cttagatctgcctacatg

SEQ ID NO: 31011 - DNA, 18 bp, synthetic construct
  source 1..18: mol_type = other DNA
tcttagatctgcctacat

SEQ ID NO: 31012 - DNA, 18 bp, synthetic construct
  source 1..18: mol_type = other DNA
gtcttagatctgcctaca

SEQ ID NO: 31013 - DNA, 18 bp, synthetic construct
  source 1..18: mol_type = other DNA
tgtcttagatctgcctac

SEQ ID NO: 31014 - DNA, 18 bp, synthetic construct
  source 1..18: mol_type = other DNA
ttgtcttagatctgccta

SEQ ID NO: 31015 - DNA, 18 bp, synthetic construct
  source 1..18: mol_type = other DNA
cttgtcttagatctgcct

SEQ ID NO: 31016 - DNA, 18 bp, synthetic construct
  source 1..18: mol_type = other DNA
gcttgtcttagatctgcc

SEQ ID NO: 31017 - DNA, 18 bp, synthetic construct
  source 1..18: mol_type = other DNA
cgcttgtcttagatctgc

SEQ ID NO: 31018 - DNA, 18 bp, synthetic construct
  source 1..18: mol_type = other DNA
acgcttgtcttagatctg

SEQ ID NO: 31019 - DNA, 18 bp, synthetic construct
  source 1..18: mol_type = other DNA
gacgcttgtcttagatct

SEQ ID NO: 31020 - DNA, 18 bp, synthetic construct
  source 1..18: mol_type = other DNA
ggacgcttgtcttagatc

SEQ ID NO: 31021 - DNA, 18 bp, synthetic construct
  source 1..18: mol_type = other DNA
tggacgcttgtcttagat

SEQ ID NO: 31022 - DNA, 18 bp, synthetic construct
  source 1..18: mol_type = other DNA
atggacgcttgtcttaga

SEQ ID NO: 31023 - DNA, 18 bp, synthetic construct
  source 1..18: mol_type = other DNA
gatggacgcttgtcttag

SEQ ID NO: 31024 - DNA, 18 bp, synthetic construct
  source 1..18: mol_type = other DNA
tgatggacgcttgtctta

SEQ ID NO: 31025 - DNA, 18 bp, synthetic construct
  source 1..18: mol_type = other DNA
gtgatggacgcttgtctt

SEQ ID NO: 31026 - DNA, 18 bp, synthetic construct
  source 1..18: mol_type = other DNA
ggtgatggacgcttgtct

SEQ ID NO: 31027 - DNA, 18 bp, synthetic construct
  source 1..18: mol_type = other DNA
aggtgatggacgcttgtc

SEQ ID NO: 31028 - DNA, 18 bp, synthetic construct
  source 1..18: mol_type = other DNA
caggtgatggacgcttgt

SEQ ID NO: 31029 - DNA, 18 bp, synthetic construct
  source 1..18: mol_type = other DNA
ccaggtgatggacgcttg

SEQ ID NO: 31030 - DNA, 18 bp, synthetic construct
  source 1..18: mol_type = other DNA
cccaggtgatggacgctt

SEQ ID NO: 31031 - DNA, 18 bp, synthetic construct
  source 1..18: mol_type = other DNA
acccaggtgatggacgct

SEQ ID NO: 31032 - DNA, 18 bp, synthetic construct
  source 1..18: mol_type = other DNA
cacccaggtgatggacgc

SEQ ID NO: 31033 - DNA, 18 bp, synthetic construct
  source 1..18: mol_type = other DNA
tcacccaggtgatggacg

SEQ ID NO: 31034 - DNA, 18 bp, synthetic construct
  source 1..18: mol_type = other DNA
atcacccaggtgatggac

SEQ ID NO: 31035 - DNA, 18 bp, synthetic construct
  source 1..18: mol_type = other DNA
gatcacccaggtgatgga

SEQ ID NO: 31036 - DNA, 18 bp, synthetic construct
  source 1..18: mol_type = other DNA
tgatcacccaggtgatgg

SEQ ID NO: 31037 - DNA, 18 bp, synthetic construct
  source 1..18: mol_type = other DNA
tatctctgcactgatcac

SEQ ID NO: 31038 - DNA, 18 bp, synthetic construct
  source 1..18: mol_type = other DNA
catatctctgcactgatc

SEQ ID NO: 31039 - DNA, 18 bp, synthetic construct
  source 1..18: mol_type = other DNA
tacatatctctgcactga

SEQ ID NO: 31040 - DNA, 18 bp, synthetic construct
  source 1..18: mol_type = other DNA
gtacatatctctgcactg

SEQ ID NO: 31041 - DNA, 18 bp, synthetic construct
  source 1..18: mol_type = other DNA
ggtacatatctctgcact

SEQ ID NO: 31042 - DNA, 18 bp, synthetic construct
  source 1..18: mol_type = other DNA
tggtacatatctctgcac

SEQ ID NO: 31043 - DNA, 18 bp, synthetic construct
  source 1..18: mol_type = other DNA
ctggtacatatctctgca

SEQ ID NO: 31044 - DNA, 18 bp, synthetic construct
  source 1..18: mol_type = other DNA
actggtacatatctctgc

SEQ ID NO: 31045 - DNA, 18 bp, synthetic construct
  source 1..18: mol_type = other DNA
cactggtacatatctctg

SEQ ID NO: 31046 - DNA, 18 bp, synthetic construct
  source 1..18: mol_type = other DNA
acactggtacatatctct

SEQ ID NO: 31047 - DNA, 18 bp, synthetic construct
  source 1..18: mol_type = other DNA
gacactggtacatatctc

SEQ ID NO: 31048 - DNA, 18 bp, synthetic construct
  source 1..18: mol_type = other DNA
ggacactggtacatatct

SEQ ID NO: 31049 - DNA, 18 bp, synthetic construct
  source 1..18: mol_type = other DNA
gggacactggtacatatc

SEQ ID NO: 31050 - DNA, 18 bp, synthetic construct
  source 1..18: mol_type = other DNA
ggggacactggtacatat

SEQ ID NO: 31051 - DNA, 18 bp, synthetic construct
  source 1..18: mol_type = other DNA
aggggacactggtacata

SEQ ID NO: 31052 - DNA, 18 bp, synthetic construct
  source 1..18: mol_type = other DNA
caggggacactggtacat

SEQ ID NO: 31053 - DNA, 18 bp, synthetic construct
  source 1..18: mol_type = other DNA
acaggggacactggtaca

SEQ ID NO: 31054 - DNA, 18 bp, synthetic construct
  source 1..18: mol_type = other DNA
tacaggggacactggtac

SEQ ID NO: 31055 - DNA, 18 bp, synthetic construct
  source 1..18: mol_type = other DNA
ctacaggggacactggta

SEQ ID NO: 31056 - DNA, 18 bp, synthetic construct
  source 1..18: mol_type = other DNA
cctacaggggacactggt

SEQ ID NO: 31057 - DNA, 18 bp, synthetic construct
  source 1..18: mol_type = other DNA
gcctacaggggacactgg

SEQ ID NO: 31058 - DNA, 18 bp, synthetic construct
  source 1..18: mol_type = other DNA
tgcctacaggggacactg

SEQ ID NO: 31059 - DNA, 18 bp, synthetic construct
  source 1..18: mol_type = other DNA
ctgcctacaggggacact

SEQ ID NO: 31060 - DNA, 18 bp, synthetic construct
  source 1..18: mol_type = other DNA
actgcctacaggggacac

SEQ ID NO: 31061 - DNA, 18 bp, synthetic construct
  source 1..18: mol_type = other DNA
cactgcctacaggggaca

SEQ ID NO: 31062 - DNA, 18 bp, synthetic construct
  source 1..18: mol_type = other DNA
gcactgcctacaggggac

SEQ ID NO: 31063 - DNA, 18 bp, synthetic construct
  source 1..18: mol_type = other DNA
aggcactgcctacagggg

SEQ ID NO: 31064 - DNA, 18 bp, synthetic construct
  source 1..18: mol_type = other DNA
taggcactgcctacaggg

SEQ ID NO: 31065 - DNA, 18 bp, synthetic construct
  source 1..18: mol_type = other DNA
ctaggcactgcctacagg

SEQ ID NO: 31066 - DNA, 18 bp, synthetic construct
  source 1..18: mol_type = other DNA
tctaggcactgcctacag

SEQ ID NO: 31067 - DNA, 18 bp, synthetic construct
  source 1..18: mol_type = other DNA
gtctaggcactgcctaca

SEQ ID NO: 31068 - DNA, 18 bp, synthetic construct
  source 1..18: mol_type = other DNA
tgtctaggcactgcctac

SEQ ID NO: 31069 - DNA, 18 bp, synthetic construct
  source 1..18: mol_type = other DNA
ttgtctaggcactgccta

SEQ ID NO: 31070 - DNA, 18 bp, synthetic construct
  source 1..18: mol_type = other DNA
cttgtctaggcactgcct

SEQ ID NO: 31071 - DNA, 18 bp, synthetic construct
  source 1..18: mol_type = other DNA
tcttgtctaggcactgcc

SEQ ID NO: 31072 - DNA, 18 bp, synthetic construct
  source 1..18: mol_type = other DNA
ctcttgtctaggcactgc

SEQ ID NO: 31073 - DNA, 18 bp, synthetic construct
  source 1..18: mol_type = other DNA
actcttgtctaggcactg

SEQ ID NO: 31074 - DNA, 18 bp, synthetic construct
  source 1..18: mol_type = other DNA
aactcttgtctaggcact

SEQ ID NO: 31075 - DNA, 18 bp, synthetic construct
  source 1..18: mol_type = other DNA
caactcttgtctaggcac

SEQ ID NO: 31076 - DNA, 18 bp, synthetic construct
  source 1..18: mol_type = other DNA
tcaactcttgtctaggca

SEQ ID NO: 31077 - DNA, 18 bp, synthetic construct
  source 1..18: mol_type = other DNA
ttcaactcttgtctaggc

SEQ ID NO: 31078 - DNA, 18 bp, synthetic construct
  source 1..18: mol_type = other DNA
attcaactcttgtctagg

SEQ ID NO: 31079 - DNA, 18 bp, synthetic construct
  source 1..18: mol_type = other DNA
gattcaactcttgtctag

SEQ ID NO: 31080 - DNA, 18 bp, synthetic construct
  source 1..18: mol_type = other DNA
tgattcaactcttgtcta

SEQ ID NO: 31081 - DNA, 18 bp, synthetic construct
  source 1..18: mol_type = other DNA
gtgattcaactcttgtct

SEQ ID NO: 31082 - DNA, 18 bp, synthetic construct
  source 1..18: mol_type = other DNA
ggtgattcaactcttgtc

SEQ ID NO: 31083 - DNA, 18 bp, synthetic construct
  source 1..18: mol_type = other DNA
aggtgattcaactcttgt

SEQ ID NO: 31084 - DNA, 18 bp, synthetic construct
  source 1..18: mol_type = other DNA
gaggtgattcaactcttg

SEQ ID NO: 31085 - DNA, 18 bp, synthetic construct
  source 1..18: mol_type = other DNA
tgaggtgattcaactctt

SEQ ID NO: 31086 - DNA, 18 bp, synthetic construct
  source 1..18: mol_type = other DNA
ctgaggtgattcaactct

SEQ ID NO: 31087 - DNA, 18 bp, synthetic construct
  source 1..18: mol_type = other DNA
tctgaggtgattcaactc

SEQ ID NO: 31088 - DNA, 18 bp, synthetic construct
  source 1..18: mol_type = other DNA
ctctgaggtgattcaact

SEQ ID NO: 31089 - DNA, 18 bp, synthetic construct
  source 1..18: mol_type = other DNA
tctctgaggtgattcaac

SEQ ID NO: 31090 - DNA, 18 bp, synthetic construct
  source 1..18: mol_type = other DNA
atctctgaggtgattcaa

SEQ ID NO: 31091 - DNA, 18 bp, synthetic construct
  source 1..18: mol_type = other DNA
gatctctgaggtgattca

SEQ ID NO: 31092 - DNA, 18 bp, synthetic construct
  source 1..18: mol_type = other DNA
tgatctctgaggtgattc

SEQ ID NO: 31093 - DNA, 18 bp, synthetic construct
  source 1..18: mol_type = other DNA
ctgatctctgaggtgatt

SEQ ID NO: 31094 - DNA, 18 bp, synthetic construct
  source 1..18: mol_type = other DNA
actgatctctgaggtgat

SEQ ID NO: 31095 - DNA, 18 bp, synthetic construct
  source 1..18: mol_type = other DNA
cactgatctctgaggtga

SEQ ID NO: 31096 - DNA, 18 bp, synthetic construct
  source 1..18: mol_type = other DNA
gcactgatctctgaggtg

SEQ ID NO: 31097 - DNA, 18 bp, synthetic construct
  source 1..18: mol_type = other DNA
tgcactgatctctgaggt

SEQ ID NO: 31098 - DNA, 18 bp, synthetic construct
  source 1..18: mol_type = other DNA
atgcactgatctctgagg

SEQ ID NO: 31099 - DNA, 18 bp, synthetic construct
  source 1..18: mol_type = other DNA
tatgcactgatctctgag

SEQ ID NO: 31100 - DNA, 18 bp, synthetic construct
  source 1..18: mol_type = other DNA
ctatgcactgatctctga

SEQ ID NO: 31101 - DNA, 18 bp, synthetic construct
  source 1..18: mol_type = other DNA
tctatgcactgatctctg

SEQ ID NO: 31102 - DNA, 18 bp, synthetic construct
  source 1..18: mol_type = other DNA
atctatgcactgatctct

SEQ ID NO: 31103 - DNA, 18 bp, synthetic construct
  source 1..18: mol_type = other DNA
tatctatgcactgatctc

SEQ ID NO: 31104 - DNA, 18 bp, synthetic construct
  source 1..18: mol_type = other DNA
atatctatgcactgatct

SEQ ID NO: 31105 - DNA, 18 bp, synthetic construct
  source 1..18: mol_type = other DNA
catatctatgcactgatc

SEQ ID NO: 31106 - DNA, 18 bp, synthetic construct
  source 1..18: mol_type = other DNA
acatatctatgcactgat

SEQ ID NO: 31107 - DNA, 18 bp, synthetic construct
  source 1..18: mol_type = other DNA
gacatatctatgcactga

SEQ ID NO: 31108 - DNA, 18 bp, synthetic construct
  source 1..18: mol_type = other DNA
tgacatatctatgcactg

SEQ ID NO: 31109 - DNA, 18 bp, synthetic construct
  source 1..18: mol_type = other DNA
gtgacatatctatgcact

SEQ ID NO: 31110 - DNA, 18 bp, synthetic construct
  source 1..18: mol_type = other DNA
tgtgacatatctatgcac

SEQ ID NO: 31111 - DNA, 18 bp, synthetic construct
  source 1..18: mol_type = other DNA
ttgtgacatatctatgca

SEQ ID NO: 31112 - DNA, 18 bp, synthetic construct
  source 1..18: mol_type = other DNA
gctttgtgacatatctat

SEQ ID NO: 31113 - DNA, 18 bp, synthetic construct
  source 1..18: mol_type = other DNA
ggctttgtgacatatcta

SEQ ID NO: 31114 - DNA, 18 bp, synthetic construct
  source 1..18: mol_type = other DNA
aggctttgtgacatatct

SEQ ID NO: 31115 - DNA, 18 bp, synthetic construct
  source 1..18: mol_type = other DNA
aaggctttgtgacatatc

SEQ ID NO: 31116 - DNA, 18 bp, synthetic construct
  source 1..18: mol_type = other DNA
gaaggctttgtgacatat

SEQ ID NO: 31117 - DNA, 18 bp, synthetic construct
  source 1..18: mol_type = other DNA
agaaggctttgtgacata

SEQ ID NO: 31118 - DNA, 18 bp, synthetic construct
  source 1..18: mol_type = other DNA
cagaaggctttgtgacat

SEQ ID NO: 31119 - DNA, 18 bp, synthetic construct
  source 1..18: mol_type = other DNA
acagaaggctttgtgaca

SEQ ID NO: 31120 - DNA, 18 bp, synthetic construct
  source 1..18: mol_type = other DNA
tacagaaggctttgtgac

SEQ ID NO: 31121 - DNA, 18 bp, synthetic construct
  source 1..18: mol_type = other DNA
ctacagaaggctttgtga

SEQ ID NO: 31122 - DNA, 18 bp, synthetic construct
  source 1..18: mol_type = other DNA
cctacagaaggctttgtg

SEQ ID NO: 31123 - DNA, 18 bp, synthetic construct
  source 1..18: mol_type = other DNA
gcctacagaaggctttgt

SEQ ID NO: 31124 - DNA, 18 bp, synthetic construct
  source 1..18: mol_type = other DNA
tgcctacagaaggctttg

SEQ ID NO: 31125 - DNA, 18 bp, synthetic construct
  source 1..18: mol_type = other DNA
ttgcctacagaaggcttt

SEQ ID NO: 31126 - DNA, 18 bp, synthetic construct
  source 1..18: mol_type = other DNA
tttgcctacagaaggctt

SEQ ID NO: 31127 - DNA, 18 bp, synthetic construct
  source 1..18: mol_type = other DNA
ctttgcctacagaaggct

SEQ ID NO: 31128 - DNA, 18 bp, synthetic construct
  source 1..18: mol_type = other DNA
gctttgcctacagaaggc

SEQ ID NO: 31129 - DNA, 18 bp, synthetic construct
  source 1..18: mol_type = other DNA
ggctttgcctacagaagg

SEQ ID NO: 31130 - DNA, 18 bp, synthetic construct
  source 1..18: mol_type = other DNA
gggctttgcctacagaag

SEQ ID NO: 31131 - DNA, 18 bp, synthetic construct
  source 1..18: mol_type = other DNA
tgggctttgcctacagaa

SEQ ID NO: 31132 - DNA, 18 bp, synthetic construct
  source 1..18: mol_type = other DNA
atgggctttgcctacaga

SEQ ID NO: 31133 - DNA, 18 bp, synthetic construct
  source 1..18: mol_type = other DNA
tatgggctttgcctacag

SEQ ID NO: 31134 - DNA, 18 bp, synthetic construct
  source 1..18: mol_type = other DNA
gtatgggctttgcctaca

SEQ ID NO: 31135 - DNA, 18 bp, synthetic construct
  source 1..18: mol_type = other DNA
tgtatgggctttgcctac

SEQ ID NO: 31136 - DNA, 18 bp, synthetic construct
  source 1..18: mol_type = other DNA
ttgtatgggctttgccta

SEQ ID NO: 31137 - DNA, 18 bp, synthetic construct
  source 1..18: mol_type = other DNA
cttgtatgggctttgcct

SEQ ID NO: 31138 - DNA, 18 bp, synthetic construct
  source 1..18: mol_type = other DNA
ccttgtatgggctttgcc

SEQ ID NO: 31139 - DNA, 18 bp, synthetic construct
  source 1..18: mol_type = other DNA
accttgtatgggctttgc

SEQ ID NO: 31140 - DNA, 18 bp, synthetic construct
  source 1..18: mol_type = other DNA
aaccttgtatgggctttg

SEQ ID NO: 31141 - DNA, 18 bp, synthetic construct
  source 1..18: mol_type = other DNA
aaaccttgtatgggcttt

SEQ ID NO: 31142 - DNA, 18 bp, synthetic construct
  source 1..18: mol_type = other DNA
taaaccttgtatgggctt

SEQ ID NO: 31143 - DNA, 18 bp, synthetic construct
  source 1..18: mol_type = other DNA
ctaaaccttgtatgggct

SEQ ID NO: 31144 - DNA, 18 bp, synthetic construct
  source 1..18: mol_type = other DNA
tctaaaccttgtatgggc

SEQ ID NO: 31145 - DNA, 18 bp, synthetic construct
  source 1..18: mol_type = other DNA
atctaaaccttgtatggg

SEQ ID NO: 31146 - DNA, 18 bp, synthetic construct
  source 1..18: mol_type = other DNA
ggtgatctaaaccttgta

SEQ ID NO: 31147 - DNA, 18 bp, synthetic construct
  source 1..18: mol_type = other DNA
aggtgatctaaaccttgt

SEQ ID NO: 31148 - DNA, 18 bp, synthetic construct
  source 1..18: mol_type = other DNA
ctaggtgatctaaacctt

SEQ ID NO: 31149 - DNA, 18 bp, synthetic construct
  source 1..18: mol_type = other DNA
cctaggtgatctaaacct

SEQ ID NO: 31150 - DNA, 18 bp, synthetic construct
  source 1..18: mol_type = other DNA
acctaggtgatctaaacc

SEQ ID NO: 31151 - DNA, 18 bp, synthetic construct
  source 1..18: mol_type = other DNA
cacctaggtgatctaaac

SEQ ID NO: 31152 - DNA, 18 bp, synthetic construct
  source 1..18: mol_type = other DNA
tcacctaggtgatctaaa

SEQ ID NO: 31153 - DNA, 18 bp, synthetic construct
  source 1..18: mol_type = other DNA
atcacctaggtgatctaa

SEQ ID NO: 31154 - DNA, 18 bp, synthetic construct
  source 1..18: mol_type = other DNA
gatcacctaggtgatcta

SEQ ID NO: 31155 - DNA, 18 bp, synthetic construct
  source 1..18: mol_type = other DNA
tgatcacctaggtgatct

SEQ ID NO: 31156 - DNA, 18 bp, synthetic construct
  source 1..18: mol_type = other DNA
ctgatcacctaggtgatc

SEQ ID NO: 31157 - DNA, 18 bp, synthetic construct
  source 1..18: mol_type = other DNA
actgatcacctaggtgat

SEQ ID NO: 31158 - DNA, 18 bp, synthetic construct
  source 1..18: mol_type = other DNA
cactgatcacctaggtga

SEQ ID NO: 31159 - DNA, 18 bp, synthetic construct
  source 1..18: mol_type = other DNA
gcactgatcacctaggtg

SEQ ID NO: 31160 - DNA, 18 bp, synthetic construct
  source 1..18: mol_type = other DNA
tgcactgatcacctaggt

SEQ ID NO: 31161 - DNA, 18 bp, synthetic construct
  source 1..18: mol_type = other DNA
ctgcactgatcacctagg

SEQ ID NO: 31162 - DNA, 18 bp, synthetic construct
  source 1..18: mol_type = other DNA
actgcactgatcacctag

SEQ ID NO: 31163 - DNA, 18 bp, synthetic construct
  source 1..18: mol_type = other DNA
cactgcactgatcaccta

SEQ ID NO: 31164 - DNA, 18 bp, synthetic construct
  source 1..18: mol_type = other DNA
tcactgcactgatcacct

SEQ ID NO: 31165 - DNA, 18 bp, synthetic construct
  source 1..18: mol_type = other DNA
atcactgcactgatcacc

SEQ ID NO: 31166 - DNA, 18 bp, synthetic construct
  source 1..18: mol_type = other DNA
tatcactgcactgatcac

SEQ ID NO: 31167 - DNA, 18 bp, synthetic construct
  source 1..18: mol_type = other DNA
atatcactgcactgatca

SEQ ID NO: 31168 - DNA, 18 bp, synthetic construct
  source 1..18: mol_type = other DNA
catatcactgcactgatc

SEQ ID NO: 31169 - DNA, 18 bp, synthetic construct
  source 1..18: mol_type = other DNA
acatatcactgcactgat

SEQ ID NO: 31170 - DNA, 18 bp, synthetic construct
  source 1..18: mol_type = other DNA
gacatatcactgcactga

SEQ ID NO: 31171 - DNA, 18 bp, synthetic construct
  source 1..18: mol_type = other DNA
tgacatatcactgcactg

SEQ ID NO: 31172 - DNA, 18 bp, synthetic construct
  source 1..18: mol_type = other DNA
gtgacatatcactgcact

SEQ ID NO: 31173 - DNA, 18 bp, synthetic construct
  source 1..18: mol_type = other DNA
tgtgacatatcactgcac

SEQ ID NO: 31174 - DNA, 18 bp, synthetic construct
  source 1..18: mol_type = other DNA
ttgtgacatatcactgca

SEQ ID NO: 31175 - DNA, 18 bp, synthetic construct
  source 1..18: mol_type = other DNA
tttgtgacatatcactgc

SEQ ID NO: 31176 - DNA, 18 bp, synthetic construct
  source 1..18: mol_type = other DNA
gggatttttgtgacatat

SEQ ID NO: 31177 - DNA, 18 bp, synthetic construct
  source 1..18: mol_type = other DNA
agggatttttgtgacata

SEQ ID NO: 31178 - DNA, 18 bp, synthetic construct
  source 1..18: mol_type = other DNA
cagggatttttgtgacat

SEQ ID NO: 31179 - DNA, 18 bp, synthetic construct
  source 1..18: mol_type = other DNA
acagggatttttgtgaca

SEQ ID NO: 31180 - DNA, 18 bp, synthetic construct
  source 1..18: mol_type = other DNA
tacagggatttttgtgac

SEQ ID NO: 31181 - DNA, 18 bp, synthetic construct
  source 1..18: mol_type = other DNA
ctacagggatttttgtga

SEQ ID NO: 31182 - DNA, 18 bp, synthetic construct
  source 1..18: mol_type = other DNA
tctacagggatttttgtg

SEQ ID NO: 31183 - DNA, 18 bp, synthetic construct
  source 1..18: mol_type = other DNA
gtctacagggatttttgt

SEQ ID NO: 31184 - DNA, 18 bp, synthetic construct
  source 1..18: mol_type = other DNA
tgtctacagggatttttg

SEQ ID NO: 31185 - DNA, 18 bp, synthetic construct
  source 1..18: mol_type = other DNA
ctgtctacagggattttt

SEQ ID NO: 31186 - DNA, 18 bp, synthetic construct
  source 1..18: mol_type = other DNA
tctgtctacagggatttt

SEQ ID NO: 31187 - DNA, 18 bp, synthetic construct
  source 1..18: mol_type = other DNA
ctctgtctacagggattt

SEQ ID NO: 31188 - DNA, 18 bp, synthetic construct
  source 1..18: mol_type = other DNA
gctctgtctacagggatt

SEQ ID NO: 31189 - DNA, 18 bp, synthetic construct
  source 1..18: mol_type = other DNA
ggctctgtctacagggat

SEQ ID NO: 31190 - DNA, 18 bp, synthetic construct
  source 1..18: mol_type = other DNA
aggctctgtctacaggga

SEQ ID NO: 31191 - DNA, 18 bp, synthetic construct
  source 1..18: mol_type = other DNA
taggctctgtctacaggg

SEQ ID NO: 31192 - DNA, 18 bp, synthetic construct
  source 1..18: mol_type = other DNA
ctaggctctgtctacagg

SEQ ID NO: 31193 - DNA, 18 bp, synthetic construct
  source 1..18: mol_type = other DNA
tctaggctctgtctacag

SEQ ID NO: 31194 - DNA, 18 bp, synthetic construct
  source 1..18: mol_type = other DNA
cttgtctaggctctgtct

SEQ ID NO: 31195 - DNA, 18 bp, synthetic construct
  source 1..18: mol_type = other DNA
tcttgtctaggctctgtc

SEQ ID NO: 31196 - DNA, 18 bp, synthetic construct
  source 1..18: mol_type = other DNA
ctcttgtctaggctctgt

SEQ ID NO: 31197 - DNA, 18 bp, synthetic construct
  source 1..18: mol_type = other DNA
taactcttgtctaggctc

SEQ ID NO: 31198 - DNA, 18 bp, synthetic construct
  source 1..18: mol_type = other DNA
gtaactcttgtctaggct

SEQ ID NO: 31199 - DNA, 18 bp, synthetic construct
  source 1..18: mol_type = other DNA
agtaactcttgtctaggc

SEQ ID NO: 31200 - DNA, 18 bp, synthetic construct
  source 1..18: mol_type = other DNA
aagtaactcttgtctagg

SEQ ID NO: 31201 - DNA, 18 bp, synthetic construct
  source 1..18: mol_type = other DNA
gtgaagtaactcttgtct

SEQ ID NO: 31202 - DNA, 18 bp, synthetic construct
  source 1..18: mol_type = other DNA
ggtgaagtaactcttgtc

SEQ ID NO: 31203 - DNA, 18 bp, synthetic construct
  source 1..18: mol_type = other DNA
aggtgaagtaactcttgt

SEQ ID NO: 31204 - DNA, 18 bp, synthetic construct
  source 1..18: mol_type = other DNA
caggtgaagtaactcttg

SEQ ID NO: 31205 - DNA, 18 bp, synthetic construct
  source 1..18: mol_type = other DNA
ccaggtgaagtaactctt

SEQ ID NO: 31206 - DNA, 18 bp, synthetic construct
  source 1..18: mol_type = other DNA
cccaggtgaagtaactct

SEQ ID NO: 31207 - DNA, 18 bp, synthetic construct
  source 1..18: mol_type = other DNA
acccaggtgaagtaactc

SEQ ID NO: 31208 - DNA, 18 bp, synthetic construct
  source 1..18: mol_type = other DNA
cacccaggtgaagtaact

SEQ ID NO: 31209 - DNA, 18 bp, synthetic construct
  source 1..18: mol_type = other DNA
tcacccaggtgaagtaac

SEQ ID NO: 31210 - DNA, 18 bp, synthetic construct
  source 1..18: mol_type = other DNA
atcacccaggtgaagtaa

SEQ ID NO: 31211 - DNA, 18 bp, synthetic construct
  source 1..18: mol_type = other DNA
gatcacccaggtgaagta

SEQ ID NO: 31212 - DNA, 18 bp, synthetic construct
  source 1..18: mol_type = other DNA
tgatcacccaggtgaagt

SEQ ID NO: 31213 - DNA, 18 bp, synthetic construct
  source 1..18: mol_type = other DNA
ctgatcacccaggtgaag

SEQ ID NO: 31214 - DNA, 18 bp, synthetic construct
  source 1..18: mol_type = other DNA
actgatcacccaggtgaa

SEQ ID NO: 31215 - DNA, 18 bp, synthetic construct
  source 1..18: mol_type = other DNA
atctgcactgatcaccca

SEQ ID NO: 31216 - DNA, 18 bp, synthetic construct
  source 1..18: mol_type = other DNA
tatctgcactgatcaccc

SEQ ID NO: 31217 - DNA, 18 bp, synthetic construct
  source 1..18: mol_type = other DNA
atatctgcactgatcacc

SEQ ID NO: 31218 - DNA, 18 bp, synthetic construct
  source 1..18: mol_type = other DNA
aatatctgcactgatcac

SEQ ID NO: 31219 - DNA, 18 bp, synthetic construct
  source 1..18: mol_type = other DNA
gtcaaatatctgcactga

SEQ ID NO: 31220 - DNA, 18 bp, synthetic construct
  source 1..18: mol_type = other DNA
gtgtcaaatatctgcact

SEQ ID NO: 31221 - DNA, 18 bp, synthetic construct
  source 1..18: mol_type = other DNA
tgtgtcaaatatctgcac

SEQ ID NO: 31222 - DNA, 18 bp, synthetic construct
  source 1..18: mol_type = other DNA
ggcattgtgtcaaatatc

SEQ ID NO: 31223 - DNA, 18 bp, synthetic construct
  source 1..18: mol_type = other DNA
gggcattgtgtcaaatat

SEQ ID NO: 31224 - DNA, 18 bp, synthetic construct
  source 1..18: mol_type = other DNA
ggggcattgtgtcaaata

SEQ ID NO: 31225 - DNA, 18 bp, synthetic construct
  source 1..18: mol_type = other DNA
gggggcattgtgtcaaat

SEQ ID NO: 31226 - DNA, 18 bp, synthetic construct
  source 1..18: mol_type = other DNA
tgggggcattgtgtcaaa

SEQ ID NO: 31227 - DNA, 18 bp, synthetic construct
  source 1..18: mol_type = other DNA
atgggggcattgtgtcaa

SEQ ID NO: 31228 - DNA, 18 bp, synthetic construct
  source 1..18: mol_type = other DNA
tatgggggcattgtgtca

SEQ ID NO: 31229 - DNA, 18 bp, synthetic construct
  source 1..18: mol_type = other DNA
ctatgggggcattgtgtc

SEQ ID NO: 31230 - DNA, 18 bp, synthetic construct
  source 1..18: mol_type = other DNA
tctatgggggcattgtgt

SEQ ID NO: 31231 - DNA, 18 bp, synthetic construct
  source 1..18: mol_type = other DNA
gtctatgggggcattgtg

SEQ ID NO: 31232 - DNA, 18 bp, synthetic construct
  source 1..18: mol_type = other DNA
tgtctatgggggcattgt

SEQ ID NO: 31233 - DNA, 18 bp, synthetic construct
  source 1..18: mol_type = other DNA
ctgtctatgggggcattg

SEQ ID NO: 31234 - DNA, 18 bp, synthetic construct
  source 1..18: mol_type = other DNA
tctgtctatgggggcatt

SEQ ID NO: 31235 - DNA, 18 bp, synthetic construct
  source 1..18: mol_type = other DNA
ctctgtctatgggggcat

SEQ ID NO: 31236 - DNA, 18 bp, synthetic construct
  source 1..18: mol_type = other DNA
aggctctgtctatggggg

SEQ ID NO: 31237 - DNA, 18 bp, synthetic construct
  source 1..18: mol_type = other DNA
taggctctgtctatgggg

SEQ ID NO: 31238 - DNA, 18 bp, synthetic construct
  source 1..18: mol_type = other DNA
ctaggctctgtctatggg

SEQ ID NO: 31239 - DNA, 18 bp, synthetic construct
  source 1..18: mol_type = other DNA
cctaggctctgtctatgg

SEQ ID NO: 31240 - DNA, 18 bp, synthetic construct
  source 1..18: mol_type = other DNA
gcctaggctctgtctatg

SEQ ID NO: 31241 - DNA, 18 bp, synthetic construct
  source 1..18: mol_type = other DNA
tgcctaggctctgtctat

SEQ ID NO: 31242 - DNA, 18 bp, synthetic construct
  source 1..18: mol_type = other DNA
ttgcctaggctctgtcta

SEQ ID NO: 31243 - DNA, 18 bp, synthetic construct
  source 1..18: mol_type = other DNA
cttgcctaggctctgtct

SEQ ID NO: 31244 - DNA, 18 bp, synthetic construct
  source 1..18: mol_type = other DNA
tcttgcctaggctctgtc

SEQ ID NO: 31245 - DNA, 18 bp, synthetic construct
  source 1..18: mol_type = other DNA
agtcttgcctaggctctg

SEQ ID NO: 31246 - DNA, 18 bp, synthetic construct
  source 1..18: mol_type = other DNA
aagtcttgcctaggctct

SEQ ID NO: 31247 - DNA, 18 bp, synthetic construct
  source 1..18: mol_type = other DNA
gaagtcttgcctaggctc

SEQ ID NO: 31248 - DNA, 18 bp, synthetic construct
  source 1..18: mol_type = other DNA
ggaagtcttgcctaggct

SEQ ID NO: 31249 - DNA, 18 bp, synthetic construct
  source 1..18: mol_type = other DNA
tggaagtcttgcctaggc

SEQ ID NO: 31250 - DNA, 18 bp, synthetic construct
  source 1..18: mol_type = other DNA
atggaagtcttgcctagg

SEQ ID NO: 31251 - DNA, 18 bp, synthetic construct
  source 1..18: mol_type = other DNA
gatggaagtcttgcctag

SEQ ID NO: 31252 - DNA, 18 bp, synthetic construct
  source 1..18: mol_type = other DNA
tgatggaagtcttgccta

SEQ ID NO: 31253 - DNA, 18 bp, synthetic construct
  source 1..18: mol_type = other DNA
gtgatggaagtcttgcct

SEQ ID NO: 31254 - DNA, 18 bp, synthetic construct
  source 1..18: mol_type = other DNA
ggtgatggaagtcttgcc

SEQ ID NO: 31255 - DNA, 18 bp, synthetic construct
  source 1..18: mol_type = other DNA
aggtgatggaagtcttgc

SEQ ID NO: 31256 - DNA, 18 bp, synthetic construct
  source 1..18: mol_type = other DNA
caggtgatggaagtcttg

SEQ ID NO: 31257 - DNA, 18 bp, synthetic construct
  source 1..18: mol_type = other DNA
ccaggtgatggaagtctt

SEQ ID NO: 31258 - DNA, 18 bp, synthetic construct
  source 1..18: mol_type = other DNA
cccaggtgatggaagtct

SEQ ID NO: 31259 - DNA, 18 bp, synthetic construct
  source 1..18: mol_type = other DNA
acccaggtgatggaagtc

SEQ ID NO: 31260 - DNA, 18 bp, synthetic construct
  source 1..18: mol_type = other DNA
cacccaggtgatggaagt

SEQ ID NO: 31261 - DNA, 18 bp, synthetic construct
  source 1..18: mol_type = other DNA
tcacccaggtgatggaag

SEQ ID NO: 31262 - DNA, 18 bp, synthetic construct
  source 1..18: mol_type = other DNA
atcacccaggtgatggaa

SEQ ID NO: 31263 - DNA, 18 bp, synthetic construct
  source 1..18: mol_type = other DNA
gacatatctctgcactga

SEQ ID NO: 31264 - DNA, 18 bp, synthetic construct
  source 1..18: mol_type = other DNA
tgacatatctctgcactg

SEQ ID NO: 31265 - DNA, 18 bp, synthetic construct
  source 1..18: mol_type = other DNA
tttgtgacatatctctgc

SEQ ID NO: 31266 - DNA, 18 bp, synthetic construct
  source 1..18: mol_type = other DNA
gatttgtgacatatctct

SEQ ID NO: 31267 - DNA, 18 bp, synthetic construct
  source 1..18: mol_type = other DNA
ggatttgtgacatatctc

SEQ ID NO: 31268 - DNA, 18 bp, synthetic construct
  source 1..18: mol_type = other DNA
gggatttgtgacatatct

SEQ ID NO: 31269 - DNA, 18 bp, synthetic construct
  source 1..18: mol_type = other DNA
ggggatttgtgacatatc

SEQ ID NO: 31270 - DNA, 18 bp, synthetic construct
  source 1..18: mol_type = other DNA
gggggatttgtgacatat

SEQ ID NO: 31271 - DNA, 18 bp, synthetic construct
  source 1..18: mol_type = other DNA
agggggatttgtgacata

SEQ ID NO: 31272 - DNA, 18 bp, synthetic construct
  source 1..18: mol_type = other DNA
gagggggatttgtgacat

SEQ ID NO: 31273 - DNA, 18 bp, synthetic construct
  source 1..18: mol_type = other DNA
agagggggatttgtgaca

SEQ ID NO: 31274 - DNA, 18 bp, synthetic construct
  source 1..18: mol_type = other DNA
tagagggggatttgtgac

SEQ ID NO: 31275 - DNA, 18 bp, synthetic construct
  source 1..18: mol_type = other DNA
ctagagggggatttgtga

SEQ ID NO: 31276 - DNA, 18 bp, synthetic construct
  source 1..18: mol_type = other DNA
cctagagggggatttgtg

SEQ ID NO: 31277 - DNA, 18 bp, synthetic construct
  source 1..18: mol_type = other DNA
gcctagagggggatttgt

SEQ ID NO: 31278 - DNA, 18 bp, synthetic construct
  source 1..18: mol_type = other DNA
tgcctagagggggatttg

SEQ ID NO: 31279 - DNA, 18 bp, synthetic construct
  source 1..18: mol_type = other DNA
ctgcctagagggggattt

SEQ ID NO: 31280 - DNA, 18 bp, synthetic construct
  source 1..18: mol_type = other DNA
tctgcctagagggggatt

SEQ ID NO: 31281 - DNA, 18 bp, synthetic construct
  source 1..18: mol_type = other DNA
ctctgcctagagggggat

SEQ ID NO: 31282 - DNA, 18 bp, synthetic construct
  source 1..18: mol_type = other DNA
actctgcctagaggggga

SEQ ID NO: 31283 - DNA, 18 bp, synthetic construct
  source 1..18: mol_type = other DNA
tactctgcctagaggggg

SEQ ID NO: 31284 - DNA, 18 bp, synthetic construct
  source 1..18: mol_type = other DNA
atactctgcctagagggg

SEQ ID NO: 31285 - DNA, 18 bp, synthetic construct
  source 1..18: mol_type = other DNA
tatactctgcctagaggg

SEQ ID NO: 31286 - DNA, 18 bp, synthetic construct
  source 1..18: mol_type = other DNA
ctatactctgcctagagg

SEQ ID NO: 31287 - DNA, 18 bp, synthetic construct
  source 1..18: mol_type = other DNA
tctatactctgcctagag

SEQ ID NO: 31288 - DNA, 18 bp, synthetic construct
  source 1..18: mol_type = other DNA
ctctatactctgcctaga

SEQ ID NO: 31289 - DNA, 18 bp, synthetic construct
  source 1..18: mol_type = other DNA
tctctatactctgcctag

SEQ ID NO: 31290 - DNA, 18 bp, synthetic construct
  source 1..18: mol_type = other DNA
ttctctatactctgccta

SEQ ID NO: 31291 - DNA, 18 bp, synthetic construct
  source 1..18: mol_type = other DNA
cttctctatactctgcct

SEQ ID NO: 31292 - DNA, 18 bp, synthetic construct
  source 1..18: mol_type = other DNA
tcttctctatactctgcc

SEQ ID NO: 31293 - DNA, 18 bp, synthetic construct
  source 1..18: mol_type = other DNA
ctcttctctatactctgc

SEQ ID NO: 31294 - DNA, 18 bp, synthetic construct
  source 1..18: mol_type = other DNA
actcttctctatactctg

SEQ ID NO: 31295 - DNA, 18 bp, synthetic construct
  source 1..18: mol_type = other DNA
gactcttctctatactct

SEQ ID NO: 31296 - DNA, 18 bp, synthetic construct
  source 1..18: mol_type = other DNA
ggactcttctctatactc

SEQ ID NO: 31297 - DNA, 18 bp, synthetic construct
  source 1..18: mol_type = other DNA
gggactcttctctatact

SEQ ID NO: 31298 - DNA, 18 bp, synthetic construct
  source 1..18: mol_type = other DNA
tgggactcttctctatac

SEQ ID NO: 31299 - DNA, 18 bp, synthetic construct
  source 1..18: mol_type = other DNA
atgggactcttctctata

SEQ ID NO: 31300 - DNA, 18 bp, synthetic construct
  source 1..18: mol_type = other DNA
gatgggactcttctctat

SEQ ID NO: 31301 - DNA, 18 bp, synthetic construct
  source 1..18: mol_type = other DNA
tgatgggactcttctcta

SEQ ID NO: 31302 - DNA, 18 bp, synthetic construct
  source 1..18: mol_type = other DNA
gtgatgggactcttctct

SEQ ID NO: 31303 - DNA, 18 bp, synthetic construct
  source 1..18: mol_type = other DNA
ggtgatgggactcttctc

SEQ ID NO: 31304 - DNA, 18 bp, synthetic construct
  source 1..18: mol_type = other DNA
aggtgatgggactcttct

SEQ ID NO: 31305 - DNA, 18 bp, synthetic construct
  source 1..18: mol_type = other DNA
caggtgatgggactcttc

SEQ ID NO: 31306 - DNA, 18 bp, synthetic construct
  source 1..18: mol_type = other DNA
ccaggtgatgggactctt

SEQ ID NO: 31307 - DNA, 18 bp, synthetic construct
  source 1..18: mol_type = other DNA
cccaggtgatgggactct

SEQ ID NO: 31308 - DNA, 18 bp, synthetic construct
  source 1..18: mol_type = other DNA
acccaggtgatgggactc

SEQ ID NO: 31309 - DNA, 18 bp, synthetic construct
  source 1..18: mol_type = other DNA
cacccaggtgatgggact

SEQ ID NO: 31310 - DNA, 18 bp, synthetic construct
  source 1..18: mol_type = other DNA
tcacccaggtgatgggac

SEQ ID NO: 31311 - DNA, 18 bp, synthetic construct
  source 1..18: mol_type = other DNA
atcacccaggtgatggga

SEQ ID NO: 31312 - DNA, 18 bp, synthetic construct
  source 1..18: mol_type = other DNA
gatcacccaggtgatggg

SEQ ID NO: 31313 - DNA, 18 bp, synthetic construct
  source 1..18: mol_type = other DNA
aatatctctgcactgatc

SEQ ID NO: 31314 - DNA, 18 bp, synthetic construct
  source 1..18: mol_type = other DNA
gtgaaatatctctgcact

SEQ ID NO: 31315 - DNA, 18 bp, synthetic construct
  source 1..18: mol_type = other DNA
caggggacattgtgaaat

SEQ ID NO: 31316 - DNA, 18 bp, synthetic construct
  source 1..18: mol_type = other DNA
acaggggacattgtgaaa

SEQ ID NO: 31317 - DNA, 18 bp, synthetic construct
  source 1..18: mol_type = other DNA
tacaggggacattgtgaa

SEQ ID NO: 31318 - DNA, 18 bp, synthetic construct
  source 1..18: mol_type = other DNA
ctacaggggacattgtga

SEQ ID NO: 31319 - DNA, 18 bp, synthetic construct
  source 1..18: mol_type = other DNA
cctacaggggacattgtg

SEQ ID NO: 31320 - DNA, 18 bp, synthetic construct
  source 1..18: mol_type = other DNA
gcctacaggggacattgt

SEQ ID NO: 31321 - DNA, 18 bp, synthetic construct
  source 1..18: mol_type = other DNA
tgcctacaggggacattg

SEQ ID NO: 31322 - DNA, 18 bp, synthetic construct
  source 1..18: mol_type = other DNA
ctgcctacaggggacatt

SEQ ID NO: 31323 - DNA, 18 bp, synthetic construct
  source 1..18: mol_type = other DNA
tctgcctacaggggacat

SEQ ID NO: 31324 - DNA, 18 bp, synthetic construct
  source 1..18: mol_type = other DNA
ctctgcctacaggggaca

SEQ ID NO: 31325 - DNA, 18 bp, synthetic construct
  source 1..18: mol_type = other DNA
tctctgcctacaggggac

SEQ ID NO: 31326 - DNA, 18 bp, synthetic construct
  source 1..18: mol_type = other DNA
ctctctgcctacagggga

SEQ ID NO: 31327 - DNA, 18 bp, synthetic construct
  source 1..18: mol_type = other DNA
actctctgcctacagggg

SEQ ID NO: 31328 - DNA, 18 bp, synthetic construct
  source 1..18: mol_type = other DNA
cactctctgcctacaggg

SEQ ID NO: 31329 - DNA, 18 bp, synthetic construct
  source 1..18: mol_type = other DNA
ccactctctgcctacagg

SEQ ID NO: 31330 - DNA, 18 bp, synthetic construct
  source 1..18: mol_type = other DNA
tccactctctgcctacag

SEQ ID NO: 31331 - DNA, 18 bp, synthetic construct
  source 1..18: mol_type = other DNA
gtccactctctgcctaca

SEQ ID NO: 31332 - DNA, 18 bp, synthetic construct
  source 1..18: mol_type = other DNA
tgtccactctctgcctac

SEQ ID NO: 31333 - DNA, 18 bp, synthetic construct
  source 1..18: mol_type = other DNA
ttgtccactctctgccta

SEQ ID NO: 31334 - DNA, 18 bp, synthetic construct
  source 1..18: mol_type = other DNA
tcttgtccactctctgcc

SEQ ID NO: 31335 - DNA, 18 bp, synthetic construct
  source 1..18: mol_type = other DNA
ctcttgtccactctctgc

SEQ ID NO: 31336 - DNA, 18 bp, synthetic construct
  source 1..18: mol_type = other DNA
actcttgtccactctctg

SEQ ID NO: 31337 - DNA, 18 bp, synthetic construct
  source 1..18: mol_type = other DNA
aactcttgtccactctct

SEQ ID NO: 31338 - DNA, 18 bp, synthetic construct
  source 1..18: mol_type = other DNA
taactcttgtccactctc

SEQ ID NO: 31339 - DNA, 18 bp, synthetic construct
  source 1..18: mol_type = other DNA
gtaactcttgtccactct

SEQ ID NO: 31340 - DNA, 18 bp, synthetic construct
  source 1..18: mol_type = other DNA
tgtaactcttgtccactc

SEQ ID NO: 31341 - DNA, 18 bp, synthetic construct
  source 1..18: mol_type = other DNA
atgtaactcttgtccact

SEQ ID NO: 31342 - DNA, 18 bp, synthetic construct
  source 1..18: mol_type = other DNA
gatgtaactcttgtccac

SEQ ID NO: 31343 - DNA, 18 bp, synthetic construct
  source 1..18: mol_type = other DNA
tgatgtaactcttgtcca

SEQ ID NO: 31344 - DNA, 18 bp, synthetic construct
  source 1..18: mol_type = other DNA
gtgatgtaactcttgtcc

SEQ ID NO: 31345 - DNA, 18 bp, synthetic construct
  source 1..18: mol_type = other DNA
ggtgatgtaactcttgtc

SEQ ID NO: 31346 - DNA, 18 bp, synthetic construct
  source 1..18: mol_type = other DNA
aggtgatgtaactcttgt

SEQ ID NO: 31347 - DNA, 18 bp, synthetic construct
  source 1..18: mol_type = other DNA
ctaggtgatgtaactctt

SEQ ID NO: 31348 - DNA, 18 bp, synthetic construct
  source 1..18: mol_type = other DNA
tctaggtgatgtaactct

SEQ ID NO: 31349 - DNA, 18 bp, synthetic construct
  source 1..18: mol_type = other DNA
atctaggtgatgtaactc

SEQ ID NO: 31350 - DNA, 18 bp, synthetic construct
  source 1..18: mol_type = other DNA
catctaggtgatgtaact

SEQ ID NO: 31351 - DNA, 18 bp, synthetic construct
  source 1..18: mol_type = other DNA
tcatctaggtgatgtaac

SEQ ID NO: 31352 - DNA, 18 bp, synthetic construct
  source 1..18: mol_type = other DNA
gatcatctaggtgatgta

SEQ ID NO: 31353 - DNA, 18 bp, synthetic construct
  source 1..18: mol_type = other DNA
agatcatctaggtgatgt

SEQ ID NO: 31354 - DNA, 18 bp, synthetic construct
  source 1..18: mol_type = other DNA
cagatcatctaggtgatg

SEQ ID NO: 31355 - DNA, 18 bp, synthetic construct
  source 1..18: mol_type = other DNA
acagatcatctaggtgat

SEQ ID NO: 31356 - DNA, 18 bp, synthetic construct
  source 1..18: mol_type = other DNA
cacagatcatctaggtga

SEQ ID NO: 31357 - DNA, 18 bp, synthetic construct
  source 1..18: mol_type = other DNA
gcacagatcatctaggtg

SEQ ID NO: 31358 - DNA, 18 bp, synthetic construct
  source 1..18: mol_type = other DNA
tgcacagatcatctaggt

SEQ ID NO: 31359 - DNA, 18 bp, synthetic construct
  source 1..18: mol_type = other DNA
ctgcacagatcatctagg

SEQ ID NO: 31360 - DNA, 18 bp, synthetic construct
  source 1..18: mol_type = other DNA
tctgcacagatcatctag

SEQ ID NO: 31361 - DNA, 18 bp, synthetic construct
  source 1..18: mol_type = other DNA
ctctgcacagatcatcta

SEQ ID NO: 31362 - DNA, 18 bp, synthetic construct
  source 1..18: mol_type = other DNA
gctctgcacagatcatct

SEQ ID NO: 31363 - DNA, 18 bp, synthetic construct
  source 1..18: mol_type = other DNA
agctctgcacagatcatc

SEQ ID NO: 31364 - DNA, 18 bp, synthetic construct
  source 1..18: mol_type = other DNA
tagctctgcacagatcat

SEQ ID NO: 31365 - DNA, 18 bp, synthetic construct
  source 1..18: mol_type = other DNA
atagctctgcacagatca

SEQ ID NO: 31366 - DNA, 18 bp, synthetic construct
  source 1..18: mol_type = other DNA
catagctctgcacagatc

SEQ ID NO: 31367 - DNA, 18 bp, synthetic construct
  source 1..18: mol_type = other DNA
acatagctctgcacagat

SEQ ID NO: 31368 - DNA, 18 bp, synthetic construct
  source 1..18: mol_type = other DNA
gacatagctctgcacaga

SEQ ID NO: 31369 - DNA, 18 bp, synthetic construct
  source 1..18: mol_type = other DNA
tgacatagctctgcacag

SEQ ID NO: 31370 - DNA, 18 bp, synthetic construct
  source 1..18: mol_type = other DNA
ttgacatagctctgcaca

SEQ ID NO: 31371 - DNA, 18 bp, synthetic construct
  source 1..18: mol_type = other DNA
tttgacatagctctgcac

SEQ ID NO: 31372 - DNA, 18 bp, synthetic construct
  source 1..18: mol_type = other DNA
ttttgacatagctctgca

SEQ ID NO: 31373 - DNA, 18 bp, synthetic construct
  source 1..18: mol_type = other DNA
gttttgacatagctctgc

SEQ ID NO: 31374 - DNA, 18 bp, synthetic construct
  source 1..18: mol_type = other DNA
cgttttgacatagctctg

SEQ ID NO: 31375 - DNA, 18 bp, synthetic construct
  source 1..18: mol_type = other DNA
gcgttttgacatagctct

SEQ ID NO: 31376 - DNA, 18 bp, synthetic construct
  source 1..18: mol_type = other DNA
ggcgttttgacatagctc

SEQ ID NO: 31377 - DNA, 18 bp, synthetic construct
  source 1..18: mol_type = other DNA
gggcgttttgacatagct

SEQ ID NO: 31378 - DNA, 18 bp, synthetic construct
  source 1..18: mol_type = other DNA
ggggcgttttgacatagc

SEQ ID NO: 31379 - DNA, 18 bp, synthetic construct
  source 1..18: mol_type = other DNA
aggggcgttttgacatag

SEQ ID NO: 31380 - DNA, 18 bp, synthetic construct
  source 1..18: mol_type = other DNA
caggggcgttttgacata

SEQ ID NO: 31381 - DNA, 18 bp, synthetic construct
  source 1..18: mol_type = other DNA
acaggggcgttttgacat

SEQ ID NO: 31382 - DNA, 18 bp, synthetic construct
  source 1..18: mol_type = other DNA
tacaggggcgttttgaca

SEQ ID NO: 31383 - DNA, 18 bp, synthetic construct
  source 1..18: mol_type = other DNA
ctacaggggcgttttgac

SEQ ID NO: 31384 - DNA, 18 bp, synthetic construct
  source 1..18: mol_type = other DNA
cctacaggggcgttttga

SEQ ID NO: 31385 - DNA, 18 bp, synthetic construct
  source 1..18: mol_type = other DNA
gcctacaggggcgttttg

SEQ ID NO: 31386 - DNA, 18 bp, synthetic construct
  source 1..18: mol_type = other DNA
tgcctacaggggcgtttt

SEQ ID NO: 31387 - DNA, 18 bp, synthetic construct
  source 1..18: mol_type = other DNA
ctgcctacaggggcgttt

SEQ ID NO: 31388 - DNA, 18 bp, synthetic construct
  source 1..18: mol_type = other DNA
tctgcctacaggggcgtt

SEQ ID NO: 31389 - DNA, 18 bp, synthetic construct
  source 1..18: mol_type = other DNA
atctaggctctgcctaca

SEQ ID NO: 31390 - DNA, 18 bp, synthetic construct
  source 1..18: mol_type = other DNA
catctaggctctgcctac

SEQ ID NO: 31391 - DNA, 18 bp, synthetic construct
  source 1..18: mol_type = other DNA
tcatctaggctctgccta

SEQ ID NO: 31392 - DNA, 18 bp, synthetic construct
  source 1..18: mol_type = other DNA
ctcatctaggctctgcct

SEQ ID NO: 31393 - DNA, 18 bp, synthetic construct
  source 1..18: mol_type = other DNA
actcatctaggctctgcc

SEQ ID NO: 31394 - DNA, 18 bp, synthetic construct
  source 1..18: mol_type = other DNA
cactcatctaggctctgc

SEQ ID NO: 31395 - DNA, 18 bp, synthetic construct
  source 1..18: mol_type = other DNA
acactcatctaggctctg

SEQ ID NO: 31396 - DNA, 18 bp, synthetic construct
  source 1..18: mol_type = other DNA
aacactcatctaggctct

SEQ ID NO: 31397 - DNA, 18 bp, synthetic construct
  source 1..18: mol_type = other DNA
taacactcatctaggctc

SEQ ID NO: 31398 - DNA, 18 bp, synthetic construct
  source 1..18: mol_type = other DNA
gtaacactcatctaggct

SEQ ID NO: 31399 - DNA, 18 bp, synthetic construct
  source 1..18: mol_type = other DNA
tgtaacactcatctaggc

SEQ ID NO: 31400 - DNA, 18 bp, synthetic construct
  source 1..18: mol_type = other DNA
gtgatgtaacactcatct

SEQ ID NO: 31401 - DNA, 18 bp, synthetic construct
  source 1..18: mol_type = other DNA
ggtgatgtaacactcatc

SEQ ID NO: 31402 - DNA, 18 bp, synthetic construct
  source 1..18: mol_type = other DNA
aggtgatgtaacactcat

SEQ ID NO: 31403 - DNA, 18 bp, synthetic construct
  source 1..18: mol_type = other DNA
caggtgatgtaacactca

SEQ ID NO: 31404 - DNA, 18 bp, synthetic construct
  source 1..18: mol_type = other DNA
ccaggtgatgtaacactc

SEQ ID NO: 31405 - DNA, 18 bp, synthetic construct
  source 1..18: mol_type = other DNA
atgatcacccaggtgatg

SEQ ID NO: 31406 - DNA, 18 bp, synthetic construct
  source 1..18: mol_type = other DNA
aatgatcacccaggtgat

SEQ ID NO: 31407 - DNA, 18 bp, synthetic construct
  source 1..18: mol_type = other DNA
caatgatcacccaggtga

SEQ ID NO: 31408 - DNA, 18 bp, synthetic construct
  source 1..18: mol_type = other DNA
gcaatgatcacccaggtg

SEQ ID NO: 31409 - DNA, 18 bp, synthetic construct
  source 1..18: mol_type = other DNA
tgcaatgatcacccaggt

SEQ ID NO: 31410 - DNA, 18 bp, synthetic construct
  source 1..18: mol_type = other DNA
ctgcaatgatcacccagg

SEQ ID NO: 31411 - DNA, 18 bp, synthetic construct
  source 1..18: mol_type = other DNA
tctgcaatgatcacccag

SEQ ID NO: 31412 - DNA, 18 bp, synthetic construct
  source 1..18: mol_type = other DNA
ctctgcaatgatcaccca

SEQ ID NO: 31413 - DNA, 18 bp, synthetic construct
  source 1..18: mol_type = other DNA
tctctgcaatgatcaccc

SEQ ID NO: 31414 - DNA, 18 bp, synthetic construct
  source 1..18: mol_type = other DNA
atctctgcaatgatcacc

SEQ ID NO: 31415 - DNA, 18 bp, synthetic construct
  source 1..18: mol_type = other DNA
tatctctgcaatgatcac

SEQ ID NO: 31416 - DNA, 18 bp, synthetic construct
  source 1..18: mol_type = other DNA
gtatctctgcaatgatca

SEQ ID NO: 31417 - DNA, 18 bp, synthetic construct
  source 1..18: mol_type = other DNA
cgtatctctgcaatgatc

SEQ ID NO: 31418 - DNA, 18 bp, synthetic construct
  source 1..18: mol_type = other DNA
acgtatctctgcaatgat

SEQ ID NO: 31419 - DNA, 18 bp, synthetic construct
  source 1..18: mol_type = other DNA
gacgtatctctgcaatga

SEQ ID NO: 31420 - DNA, 18 bp, synthetic construct
  source 1..18: mol_type = other DNA
tgacgtatctctgcaatg

SEQ ID NO: 31421 - DNA, 18 bp, synthetic construct
  source 1..18: mol_type = other DNA
gtgacgtatctctgcaat

SEQ ID NO: 31422 - DNA, 18 bp, synthetic construct
  source 1..18: mol_type = other DNA
tgtgacgtatctctgcaa

SEQ ID NO: 31423 - DNA, 18 bp, synthetic construct
  source 1..18: mol_type = other DNA
ttgtgacgtatctctgca

SEQ ID NO: 31424 - DNA, 18 bp, synthetic construct
  source 1..18: mol_type = other DNA
attgtgacgtatctctgc

SEQ ID NO: 31425 - DNA, 18 bp, synthetic construct
  source 1..18: mol_type = other DNA
tattgtgacgtatctctg

SEQ ID NO: 31426 - DNA, 18 bp, synthetic construct
  source 1..18: mol_type = other DNA
gtattgtgacgtatctct

SEQ ID NO: 31427 - DNA, 18 bp, synthetic construct
  source 1..18: mol_type = other DNA
ggtattgtgacgtatctc

SEQ ID NO: 31428 - DNA, 18 bp, synthetic construct
  source 1..18: mol_type = other DNA
gggtattgtgacgtatct

SEQ ID NO: 31429 - DNA, 18 bp, synthetic construct
  source 1..18: mol_type = other DNA
ggggtattgtgacgtatc

SEQ ID NO: 31430 - DNA, 18 bp, synthetic construct
  source 1..18: mol_type = other DNA
gggggtattgtgacgtat

SEQ ID NO: 31431 - DNA, 18 bp, synthetic construct
  source 1..18: mol_type = other DNA
agggggtattgtgacgta

SEQ ID NO: 31432 - DNA, 18 bp, synthetic construct
  source 1..18: mol_type = other DNA
cagggggtattgtgacgt

SEQ ID NO: 31433 - DNA, 18 bp, synthetic construct
  source 1..18: mol_type = other DNA
acagggggtattgtgacg

SEQ ID NO: 31434 - DNA, 18 bp, synthetic construct
  source 1..18: mol_type = other DNA
tacagggggtattgtgac

SEQ ID NO: 31435 - DNA, 18 bp, synthetic construct
  source 1..18: mol_type = other DNA
ctacagggggtattgtga

SEQ ID NO: 31436 - DNA, 18 bp, synthetic construct
  source 1..18: mol_type = other DNA
cctacagggggtattgtg

SEQ ID NO: 31437 - DNA, 18 bp, synthetic construct
  source 1..18: mol_type = other DNA
acctacagggggtattgt

SEQ ID NO: 31438 - DNA, 18 bp, synthetic construct
  source 1..18: mol_type = other DNA
cacctacagggggtattg

SEQ ID NO: 31439 - DNA, 18 bp, synthetic construct
  source 1..18: mol_type = other DNA
ccacctacagggggtatt

SEQ ID NO: 31440 - DNA, 18 bp, synthetic construct
  source 1..18: mol_type = other DNA
cccacctacagggggtat

SEQ ID NO: 31441 - DNA, 18 bp, synthetic construct
  source 1..18: mol_type = other DNA
tctaggccccacctacag

SEQ ID NO: 31442 - DNA, 18 bp, synthetic construct
  source 1..18: mol_type = other DNA
aactcttgtctaggcccc

SEQ ID NO: 31443 - DNA, 18 bp, synthetic construct
  source 1..18: mol_type = other DNA
taactcttgtctaggccc

SEQ ID NO: 31444 - DNA, 18 bp, synthetic construct
  source 1..18: mol_type = other DNA
gtaactcttgtctaggcc

SEQ ID NO: 31445 - DNA, 18 bp, synthetic construct
  source 1..18: mol_type = other DNA
tgtaactcttgtctaggc

SEQ ID NO: 31446 - DNA, 18 bp, synthetic construct
  source 1..18: mol_type = other DNA
atgtaactcttgtctagg

SEQ ID NO: 31447 - DNA, 18 bp, synthetic construct
  source 1..18: mol_type = other DNA
gatgtaactcttgtctag

SEQ ID NO: 31448 - DNA, 18 bp, synthetic construct
  source 1..18: mol_type = other DNA
tgatgtaactcttgtcta

SEQ ID NO: 31449 - DNA, 18 bp, synthetic construct
  source 1..18: mol_type = other DNA
gtgatgtaactcttgtct

SEQ ID NO: 31450 - DNA, 18 bp, synthetic construct
  source 1..18: mol_type = other DNA
caggtgatgtaactcttg

SEQ ID NO: 31451 - DNA, 18 bp, synthetic construct
  source 1..18: mol_type = other DNA
ccaggtgatgtaactctt

SEQ ID NO: 31452 - DNA, 18 bp, synthetic construct
  source 1..18: mol_type = other DNA
cccaggtgatgtaactct

SEQ ID NO: 31453 - DNA, 18 bp, synthetic construct
  source 1..18: mol_type = other DNA
acccaggtgatgtaactc

SEQ ID NO: 31454 - DNA, 18 bp, synthetic construct
  source 1..18: mol_type = other DNA
cacccaggtgatgtaact

SEQ ID NO: 31455 - DNA, 18 bp, synthetic construct
  source 1..18: mol_type = other DNA
tactgatcacccaggtga

SEQ ID NO: 31456 - DNA, 18 bp, synthetic construct
  source 1..18: mol_type = other DNA
gtactgatcacccaggtg

SEQ ID NO: 31457 - DNA, 18 bp, synthetic construct
  source 1..18: mol_type = other DNA
tgtactgatcacccaggt

SEQ ID NO: 31458 - DNA, 18 bp, synthetic construct
  source 1..18: mol_type = other DNA
ctgtactgatcacccagg

SEQ ID NO: 31459 - DNA, 18 bp, synthetic construct
  source 1..18: mol_type = other DNA
tctgtactgatcacccag

SEQ ID NO: 31460 - DNA, 18 bp, synthetic construct
  source 1..18: mol_type = other DNA
ttctgtactgatcaccca

SEQ ID NO: 31461 - DNA, 18 bp, synthetic construct
  source 1..18: mol_type = other DNA
cttctgtactgatcaccc

SEQ ID NO: 31462 - DNA, 18 bp, synthetic construct
  source 1..18: mol_type = other DNA
acttctgtactgatcacc

SEQ ID NO: 31463 - DNA, 18 bp, synthetic construct
  source 1..18: mol_type = other DNA
tacttctgtactgatcac

SEQ ID NO: 31464 - DNA, 18 bp, synthetic construct
  source 1..18: mol_type = other DNA
atacttctgtactgatca

SEQ ID NO: 31465 - DNA, 18 bp, synthetic construct
  source 1..18: mol_type = other DNA
catacttctgtactgatc

SEQ ID NO: 31466 - DNA, 18 bp, synthetic construct
  source 1..18: mol_type = other DNA
acatacttctgtactgat

SEQ ID NO: 31467 - DNA, 18 bp, synthetic construct
  source 1..18: mol_type = other DNA
gacatacttctgtactga

SEQ ID NO: 31468 - DNA, 18 bp, synthetic construct
  source 1..18: mol_type = other DNA
tgacatacttctgtactg

SEQ ID NO: 31469 - DNA, 18 bp, synthetic construct
  source 1..18: mol_type = other DNA
gtgacatacttctgtact

SEQ ID NO: 31470 - DNA, 18 bp, synthetic construct
  source 1..18: mol_type = other DNA
tgtgacatacttctgtac

SEQ ID NO: 31471 - DNA, 18 bp, synthetic construct
  source 1..18: mol_type = other DNA
ttgtgacatacttctgta

SEQ ID NO: 31472 - DNA, 18 bp, synthetic construct
  source 1..18: mol_type = other DNA
tttgtgacatacttctgt

SEQ ID NO: 31473 - DNA, 18 bp, synthetic construct
  source 1..18: mol_type = other DNA
ctttgtgacatacttctg

SEQ ID NO: 31474 - DNA, 18 bp, synthetic construct
  source 1..18: mol_type = other DNA
gctttgtgacatacttct

SEQ ID NO: 31475 - DNA, 18 bp, synthetic construct
  source 1..18: mol_type = other DNA
ggctttgtgacatacttc

SEQ ID NO: 31476 - DNA, 18 bp, synthetic construct
  source 1..18: mol_type = other DNA
gggctttgtgacatactt

SEQ ID NO: 31477 - DNA, 18 bp, synthetic construct
  source 1..18: mol_type = other DNA
ggggctttgtgacatact

SEQ ID NO: 31478 - DNA, 18 bp, synthetic construct
  source 1..18: mol_type = other DNA
aggggctttgtgacatac

SEQ ID NO: 31479 - DNA, 18 bp, synthetic construct
  source 1..18: mol_type = other DNA
caggggctttgtgacata

SEQ ID NO: 31480 - DNA, 18 bp, synthetic construct
  source 1..18: mol_type = other DNA
acaggggctttgtgacat

SEQ ID NO: 31481 - DNA, 18 bp, synthetic construct
  source 1..18: mol_type = other DNA
aacccaggtgatgtaact

SEQ ID NO: 31482 - DNA, 18 bp, synthetic construct
  source 1..18: mol_type = other DNA
taacccaggtgatgtaac

SEQ ID NO: 31483 - DNA, 18 bp, synthetic construct
  source 1..18: mol_type = other DNA
ataacccaggtgatgtaa

SEQ ID NO: 31484 - DNA, 18 bp, synthetic construct
  source 1..18: mol_type = other DNA
gataacccaggtgatgta

SEQ ID NO: 31485 - DNA, 18 bp, synthetic construct
  source 1..18: mol_type = other DNA
tgataacccaggtgatgt

SEQ ID NO: 31486 - DNA, 18 bp, synthetic construct
  source 1..18: mol_type = other DNA
ctgataacccaggtgatg

SEQ ID NO: 31487 - DNA, 18 bp, synthetic construct
  source 1..18: mol_type = other DNA
actgataacccaggtgat

SEQ ID NO: 31488 - DNA, 18 bp, synthetic construct
  source 1..18: mol_type = other DNA
cactgataacccaggtga

SEQ ID NO: 31489 - DNA, 18 bp, synthetic construct
  source 1..18: mol_type = other DNA
gcactgataacccaggtg

SEQ ID NO: 31490 - DNA, 18 bp, synthetic construct
  source 1..18: mol_type = other DNA
tgcactgataacccaggt

SEQ ID NO: 31491 - DNA, 18 bp, synthetic construct
  source 1..18: mol_type = other DNA
ctgcactgataacccagg

SEQ ID NO: 31492 - DNA, 18 bp, synthetic construct
  source 1..18: mol_type = other DNA
tctgcactgataacccag

SEQ ID NO: 31493 - DNA, 18 bp, synthetic construct
  source 1..18: mol_type = other DNA
ttctgcactgataaccca

SEQ ID NO: 31494 - DNA, 18 bp, synthetic construct
  source 1..18: mol_type = other DNA
tttctgcactgataaccc

SEQ ID NO: 31495 - DNA, 18 bp, synthetic construct
  source 1..18: mol_type = other DNA
atttctgcactgataacc

SEQ ID NO: 31496 - DNA, 18 bp, synthetic construct
  source 1..18: mol_type = other DNA
catatttctgcactgata

SEQ ID NO: 31497 - DNA, 18 bp, synthetic construct
  source 1..18: mol_type = other DNA
acatatttctgcactgat

SEQ ID NO: 31498 - DNA, 18 bp, synthetic construct
  source 1..18: mol_type = other DNA
gacatatttctgcactga

SEQ ID NO: 31499 - DNA, 18 bp, synthetic construct
  source 1..18: mol_type = other DNA
tgacatatttctgcactg

SEQ ID NO: 31500 - DNA, 18 bp, synthetic construct
  source 1..18: mol_type = other DNA
gtgacatatttctgcact

SEQ ID NO: 31501 - DNA, 18 bp, synthetic construct
  source 1..18: mol_type = other DNA
tgtgacatatttctgcac

SEQ ID NO: 31502 - DNA, 18 bp, synthetic construct
  source 1..18: mol_type = other DNA
ttgtgacatatttctgca

SEQ ID NO: 31503 - DNA, 18 bp, synthetic construct
  source 1..18: mol_type = other DNA
tttgtgacatatttctgc

SEQ ID NO: 31504 - DNA, 18 bp, synthetic construct
  source 1..18: mol_type = other DNA
gctttgtgacatatttct

SEQ ID NO: 31505 - DNA, 18 bp, synthetic construct
  source 1..18: mol_type = other DNA
ggctttgtgacatatttc

SEQ ID NO: 31506 - DNA, 18 bp, synthetic construct
  source 1..18: mol_type = other DNA
gggctttgtgacatattt

SEQ ID NO: 31507 - DNA, 18 bp, synthetic construct
  source 1..18: mol_type = other DNA
ggggctttgtgacatatt

SEQ ID NO: 31508 - DNA, 18 bp, synthetic construct
  source 1..18: mol_type = other DNA
aggggctttgtgacatat

SEQ ID NO: 31509 - DNA, 18 bp, synthetic construct
  source 1..18: mol_type = other DNA
acctacaggggctttgtg

SEQ ID NO: 31510 - DNA, 18 bp, synthetic construct
  source 1..18: mol_type = other DNA
gacctacaggggctttgt

SEQ ID NO: 31511 - DNA, 18 bp, synthetic construct
  source 1..18: mol_type = other DNA
cgacctacaggggctttg

SEQ ID NO: 31512 - DNA, 18 bp, synthetic construct
  source 1..18: mol_type = other DNA
tcgacctacaggggcttt

SEQ ID NO: 31513 - DNA, 18 bp, synthetic construct
  source 1..18: mol_type = other DNA
ctcgacctacaggggctt

SEQ ID NO: 31514 - DNA, 18 bp, synthetic construct
  source 1..18: mol_type = other DNA
actcgacctacaggggct

SEQ ID NO: 31515 - DNA, 18 bp, synthetic construct
  source 1..18: mol_type = other DNA
gactcgacctacaggggc

SEQ ID NO: 31516 - DNA, 18 bp, synthetic construct
  source 1..18: mol_type = other DNA
agactcgacctacagggg

SEQ ID NO: 31517 - DNA, 18 bp, synthetic construct
  source 1..18: mol_type = other DNA
tagactcgacctacaggg

SEQ ID NO: 31518 - DNA, 18 bp, synthetic construct
  source 1..18: mol_type = other DNA
ctagactcgacctacagg

SEQ ID NO: 31519 - DNA, 18 bp, synthetic construct
  source 1..18: mol_type = other DNA
tctagactcgacctacag

SEQ ID NO: 31520 - DNA, 18 bp, synthetic construct
  source 1..18: mol_type = other DNA
gtctagactcgacctaca

SEQ ID NO: 31521 - DNA, 18 bp, synthetic construct
  source 1..18: mol_type = other DNA
tgtctagactcgacctac

SEQ ID NO: 31522 - DNA, 18 bp, synthetic construct
  source 1..18: mol_type = other DNA
ttgtctagactcgaccta

SEQ ID NO: 31523 - DNA, 18 bp, synthetic construct
  source 1..18: mol_type = other DNA
cttgtctagactcgacct

SEQ ID NO: 31524 - DNA, 18 bp, synthetic construct
  source 1..18: mol_type = other DNA
tcttgtctagactcgacc

SEQ ID NO: 31525 - DNA, 18 bp, synthetic construct
  source 1..18: mol_type = other DNA
ctcttgtctagactcgac

SEQ ID NO: 31526 - DNA, 18 bp, synthetic construct
  source 1..18: mol_type = other DNA
actcttgtctagactcga

SEQ ID NO: 31527 - DNA, 18 bp, synthetic construct
  source 1..18: mol_type = other DNA
aactcttgtctagactcg

SEQ ID NO: 31528 - DNA, 18 bp, synthetic construct
  source 1..18: mol_type = other DNA
taactcttgtctagactc

SEQ ID NO: 31529 - DNA, 18 bp, synthetic construct
  source 1..18: mol_type = other DNA
gtaactcttgtctagact

SEQ ID NO: 31530 - DNA, 18 bp, synthetic construct
  source 1..18: mol_type = other DNA
tgtaactcttgtctagac

SEQ ID NO: 31531 - DNA, 18 bp, synthetic construct
  source 1..18: mol_type = other DNA
atgtaactcttgtctaga

SEQ ID NO: 31532 - DNA, 18 bp, synthetic construct
  source 1..18: mol_type = other DNA
agatgtaactcttgtcta

SEQ ID NO: 31533 - DNA, 18 bp, synthetic construct
  source 1..18: mol_type = other DNA
gagatgtaactcttgtct

SEQ ID NO: 31534 - DNA, 18 bp, synthetic construct
  source 1..18: mol_type = other DNA
ggagatgtaactcttgtc

SEQ ID NO: 31535 - DNA, 18 bp, synthetic construct
  source 1..18: mol_type = other DNA
aggagatgtaactcttgt

SEQ ID NO: 31536 - DNA, 18 bp, synthetic construct
  source 1..18: mol_type = other DNA
caggagatgtaactcttg

SEQ ID NO: 31537 - DNA, 18 bp, synthetic construct
  source 1..18: mol_type = other DNA
ccaggagatgtaactctt

SEQ ID NO: 31538 - DNA, 18 bp, synthetic construct
  source 1..18: mol_type = other DNA
cccaggagatgtaactct

SEQ ID NO: 31539 - DNA, 18 bp, synthetic construct
  source 1..18: mol_type = other DNA
acccaggagatgtaactc

SEQ ID NO: 31540 - DNA, 18 bp, synthetic construct
  source 1..18: mol_type = other DNA
cacccaggagatgtaact

SEQ ID NO: 31541 - DNA, 18 bp, synthetic construct
  source 1..18: mol_type = other DNA
tcacccaggagatgtaac

SEQ ID NO: 31542 - DNA, 18 bp, synthetic construct
  source 1..18: mol_type = other DNA
atcacccaggagatgtaa

SEQ ID NO: 31543 - DNA, 18 bp, synthetic construct
  source 1..18: mol_type = other DNA
gatcacccaggagatgta

SEQ ID NO: 31544 - DNA, 18 bp, synthetic construct
  source 1..18: mol_type = other DNA
tgatcacccaggagatgt

SEQ ID NO: 31545 - DNA, 18 bp, synthetic construct
  source 1..18: mol_type = other DNA
ctgatcacccaggagatg

SEQ ID NO: 31546 - DNA, 18 bp, synthetic construct
  source 1..18: mol_type = other DNA
actgatcacccaggagat

SEQ ID NO: 31547 - DNA, 18 bp, synthetic construct
  source 1..18: mol_type = other DNA
cactgatcacccaggaga

SEQ ID NO: 31548 - DNA, 18 bp, synthetic construct
  source 1..18: mol_type = other DNA
gcactgatcacccaggag

SEQ ID NO: 31549 - DNA, 18 bp, synthetic construct
  source 1..18: mol_type = other DNA
tgcactgatcacccagga

SEQ ID NO: 31550 - DNA, 18 bp, synthetic construct
  source 1..18: mol_type = other DNA
ttgcactgatcacccagg

SEQ ID NO: 31551 - DNA, 18 bp, synthetic construct
  source 1..18: mol_type = other DNA
tttgcactgatcacccag

SEQ ID NO: 31552 - DNA, 18 bp, synthetic construct
  source 1..18: mol_type = other DNA
ctttgcactgatcaccca

SEQ ID NO: 31553 - DNA, 18 bp, synthetic construct
  source 1..18: mol_type = other DNA
tctttgcactgatcaccc

SEQ ID NO: 31554 - DNA, 18 bp, synthetic construct
  source 1..18: mol_type = other DNA
atctttgcactgatcacc

SEQ ID NO: 31555 - DNA, 18 bp, synthetic construct
  source 1..18: mol_type = other DNA
tatctttgcactgatcac

SEQ ID NO: 31556 - DNA, 18 bp, synthetic construct
  source 1..18: mol_type = other DNA
atatctttgcactgatca

SEQ ID NO: 31557 - DNA, 18 bp, synthetic construct
  source 1..18: mol_type = other DNA
catatctttgcactgatc

SEQ ID NO: 31558 - DNA, 18 bp, synthetic construct
  source 1..18: mol_type = other DNA
acatatctttgcactgat

SEQ ID NO: 31559 - DNA, 18 bp, synthetic construct
  source 1..18: mol_type = other DNA
gacatatctttgcactga

SEQ ID NO: 31560 - DNA, 18 bp, synthetic construct
  source 1..18: mol_type = other DNA
tgacatatctttgcactg

SEQ ID NO: 31561 - DNA, 18 bp, synthetic construct
  source 1..18: mol_type = other DNA
gtgacatatctttgcact

SEQ ID NO: 31562 - DNA, 18 bp, synthetic construct
  source 1..18: mol_type = other DNA
tgtgacatatctttgcac

SEQ ID NO: 31563 - DNA, 18 bp, synthetic construct
  source 1..18: mol_type = other DNA
ttgtgacatatctttgca

SEQ ID NO: 31564 - DNA, 18 bp, synthetic construct
  source 1..18: mol_type = other DNA
tttgtgacatatctttgc

SEQ ID NO: 31565 - DNA, 18 bp, synthetic construct
  source 1..18: mol_type = other DNA
gctttgtgacatatcttt

SEQ ID NO: 31566 - DNA, 18 bp, synthetic construct
  source 1..18: mol_type = other DNA
ggctttgtgacatatctt

SEQ ID NO: 31567 - DNA, 18 bp, synthetic construct
  source 1..18: mol_type = other DNA
gggctttgtgacatatct

SEQ ID NO: 31568 - DNA, 18 bp, synthetic construct
  source 1..18: mol_type = other DNA
ggggctttgtgacatatc

SEQ ID NO: 31569 - DNA, 18 bp, synthetic construct
  source 1..18: mol_type = other DNA
gggggctttgtgacatat

SEQ ID NO: 31570 - DNA, 18 bp, synthetic construct
  source 1..18: mol_type = other DNA
agggggctttgtgacata

SEQ ID NO: 31571 - DNA, 18 bp, synthetic construct
  source 1..18: mol_type = other DNA
cagggggctttgtgacat

SEQ ID NO: 31572 - DNA, 18 bp, synthetic construct
  source 1..18: mol_type = other DNA
acagggggctttgtgaca

SEQ ID NO: 31573 - DNA, 18 bp, synthetic construct
  source 1..18: mol_type = other DNA
tacagggggctttgtgac

SEQ ID NO: 31574 - DNA, 18 bp, synthetic construct
  source 1..18: mol_type = other DNA
atttgtctacagggggct

SEQ ID NO: 31575 - DNA, 18 bp, synthetic construct
  source 1..18: mol_type = other DNA
gatttgtctacagggggc

SEQ ID NO: 31576 - DNA, 18 bp, synthetic construct
  source 1..18: mol_type = other DNA
ggatttgtctacaggggg

SEQ ID NO: 31577 - DNA, 18 bp, synthetic construct
  source 1..18: mol_type = other DNA
gggatttgtctacagggg

SEQ ID NO: 31578 - DNA, 18 bp, synthetic construct
  source 1..18: mol_type = other DNA
tgggatttgtctacaggg

SEQ ID NO: 31579 - DNA, 18 bp, synthetic construct
  source 1..18: mol_type = other DNA
ctgggatttgtctacagg

SEQ ID NO: 31580 - DNA, 18 bp, synthetic construct
  source 1..18: mol_type = other DNA
tctgggatttgtctacag

SEQ ID NO: 31581 - DNA, 18 bp, synthetic construct
  source 1..18: mol_type = other DNA
ttctgggatttgtctaca

SEQ ID NO: 31582 - DNA, 18 bp, synthetic construct
  source 1..18: mol_type = other DNA
tttctgggatttgtctac

SEQ ID NO: 31583 - DNA, 18 bp, synthetic construct
  source 1..18: mol_type = other DNA
ttttctgggatttgtcta

SEQ ID NO: 31584 - DNA, 18 bp, synthetic construct
  source 1..18: mol_type = other DNA
attttctgggatttgtct

SEQ ID NO: 31585 - DNA, 18 bp, synthetic construct
  source 1..18: mol_type = other DNA
aattttctgggatttgtc

SEQ ID NO: 31586 - DNA, 18 bp, synthetic construct
  source 1..18: mol_type = other DNA
caattttctgggatttgt

SEQ ID NO: 31587 - DNA, 18 bp, synthetic construct
  source 1..18: mol_type = other DNA
ccaggtgatgtaacaatt

SEQ ID NO: 31588 - DNA, 18 bp, synthetic construct
  source 1..18: mol_type = other DNA
cccaggtgatgtaacaat

SEQ ID NO: 31589 - DNA, 18 bp, synthetic construct
  source 1..18: mol_type = other DNA
acccaggtgatgtaacaa

SEQ ID NO: 31590 - DNA, 18 bp, synthetic construct
  source 1..18: mol_type = other DNA
ccactgatcacccaggtg

SEQ ID NO: 31591 - DNA, 18 bp, synthetic construct
  source 1..18: mol_type = other DNA
tccactgatcacccaggt

SEQ ID NO: 31592 - DNA, 18 bp, synthetic construct
  source 1..18: mol_type = other DNA
ctccactgatcacccagg

SEQ ID NO: 31593 - DNA, 18 bp, synthetic construct
  source 1..18: mol_type = other DNA
tctccactgatcacccag

SEQ ID NO: 31594 - DNA, 18 bp, synthetic construct
  source 1..18: mol_type = other DNA
atctccactgatcaccca

SEQ ID NO: 31595 - DNA, 18 bp, synthetic construct
  source 1..18: mol_type = other DNA
tatctccactgatcaccc

SEQ ID NO: 31596 - DNA, 18 bp, synthetic construct
  source 1..18: mol_type = other DNA
atatctccactgatcacc

SEQ ID NO: 31597 - DNA, 18 bp, synthetic construct
  source 1..18: mol_type = other DNA
catatctccactgatcac

SEQ ID NO: 31598 - DNA, 18 bp, synthetic construct
  source 1..18: mol_type = other DNA
acatatctccactgatca

SEQ ID NO: 31599 - DNA, 18 bp, synthetic construct
  source 1..18: mol_type = other DNA
cacatatctccactgatc

SEQ ID NO: 31600 - DNA, 18 bp, synthetic construct
  source 1..18: mol_type = other DNA
acacatatctccactgat

SEQ ID NO: 31601 - DNA, 18 bp, synthetic construct
  source 1..18: mol_type = other DNA
gacacatatctccactga

SEQ ID NO: 31602 - DNA, 18 bp, synthetic construct
  source 1..18: mol_type = other DNA
tgacacatatctccactg

SEQ ID NO: 31603 - DNA, 18 bp, synthetic construct
  source 1..18: mol_type = other DNA
gtgacacatatctccact

SEQ ID NO: 31604 - DNA, 18 bp, synthetic construct
  source 1..18: mol_type = other DNA
tgtgacacatatctccac

SEQ ID NO: 31605 - DNA, 18 bp, synthetic construct
  source 1..18: mol_type = other DNA
ttgtgacacatatctcca

SEQ ID NO: 31606 - DNA, 18 bp, synthetic construct
  source 1..18: mol_type = other DNA
attgtgacacatatctcc

SEQ ID NO: 31607 - DNA, 18 bp, synthetic construct
  source 1..18: mol_type = other DNA
ggggaattgtgacacata

SEQ ID NO: 31608 - DNA, 18 bp, synthetic construct
  source 1..18: mol_type = other DNA
aggggaattgtgacacat

SEQ ID NO: 31609 - DNA, 18 bp, synthetic construct
  source 1..18: mol_type = other DNA
aaggggaattgtgacaca

SEQ ID NO: 31610 - DNA, 18 bp, synthetic construct
  source 1..18: mol_type = other DNA
cctaaaggggaattgtga

SEQ ID NO: 31611 - DNA, 18 bp, synthetic construct
  source 1..18: mol_type = other DNA
gcctaaaggggaattgtg

SEQ ID NO: 31612 - DNA, 18 bp, synthetic construct
  source 1..18: mol_type = other DNA
tgcctaaaggggaattgt

SEQ ID NO: 31613 - DNA, 18 bp, synthetic construct
  source 1..18: mol_type = other DNA
gtgcctaaaggggaattg

SEQ ID NO: 31614 - DNA, 18 bp, synthetic construct
  source 1..18: mol_type = other DNA
tgtgcctaaaggggaatt

SEQ ID NO: 31615 - DNA, 18 bp, synthetic construct
  source 1..18: mol_type = other DNA
ctgtgcctaaaggggaat

SEQ ID NO: 31616 - DNA, 18 bp, synthetic construct
  source 1..18: mol_type = other DNA
gctgtgcctaaaggggaa

SEQ ID NO: 31617 - DNA, 18 bp, synthetic construct
  source 1..18: mol_type = other DNA
agctgtgcctaaagggga

SEQ ID NO: 31618 - DNA, 18 bp, synthetic construct
  source 1..18: mol_type = other DNA
aagctgtgcctaaagggg

SEQ ID NO: 31619 - DNA, 18 bp, synthetic construct
  source 1..18: mol_type = other DNA
taagctgtgcctaaaggg

SEQ ID NO: 31620 - DNA, 18 bp, synthetic construct
  source 1..18: mol_type = other DNA
ctaagctgtgcctaaagg

SEQ ID NO: 31621 - DNA, 18 bp, synthetic construct
  source 1..18: mol_type = other DNA
tctaagctgtgcctaaag

SEQ ID NO: 31622 - DNA, 18 bp, synthetic construct
  source 1..18: mol_type = other DNA
gtctaagctgtgcctaaa

SEQ ID NO: 31623 - DNA, 18 bp, synthetic construct
  source 1..18: mol_type = other DNA
tgtctaagctgtgcctaa

SEQ ID NO: 31624 - DNA, 18 bp, synthetic construct
  source 1..18: mol_type = other DNA
ttgtctaagctgtgccta

SEQ ID NO: 31625 - DNA, 18 bp, synthetic construct
  source 1..18: mol_type = other DNA
cttgtctaagctgtgcct

SEQ ID NO: 31626 - DNA, 18 bp, synthetic construct
  source 1..18: mol_type = other DNA
gcttgtctaagctgtgcc

SEQ ID NO: 31627 - DNA, 18 bp, synthetic construct
  source 1..18: mol_type = other DNA
cgcttgtctaagctgtgc

SEQ ID NO: 31628 - DNA, 18 bp, synthetic construct
  source 1..18: mol_type = other DNA
acgcttgtctaagctgtg

SEQ ID NO: 31629 - DNA, 18 bp, synthetic construct
  source 1..18: mol_type = other DNA
aacgcttgtctaagctgt

SEQ ID NO: 31630 - DNA, 18 bp, synthetic construct
  source 1..18: mol_type = other DNA
taacgcttgtctaagctg

SEQ ID NO: 31631 - DNA, 18 bp, synthetic construct
  source 1..18: mol_type = other DNA
gtaacgcttgtctaagct

SEQ ID NO: 31632 - DNA, 18 bp, synthetic construct
  source 1..18: mol_type = other DNA
tgtaacgcttgtctaagc

SEQ ID NO: 31633 - DNA, 18 bp, synthetic construct
  source 1..18: mol_type = other DNA
gatgtaacgcttgtctaa

SEQ ID NO: 31634 - DNA, 18 bp, synthetic construct
  source 1..18: mol_type = other DNA
tgatgtaacgcttgtcta

SEQ ID NO: 31635 - DNA, 18 bp, synthetic construct
  source 1..18: mol_type = other DNA
gtgatgtaacgcttgtct

SEQ ID NO: 31636 - DNA, 18 bp, synthetic construct
  source 1..18: mol_type = other DNA
tgtgatgtaacgcttgtc

SEQ ID NO: 31637 - DNA, 18 bp, synthetic construct
  source 1..18: mol_type = other DNA
atgtgatgtaacgcttgt

SEQ ID NO: 31638 - DNA, 18 bp, synthetic construct
  source 1..18: mol_type = other DNA
catgtgatgtaacgcttg

SEQ ID NO: 31639 - DNA, 18 bp, synthetic construct
  source 1..18: mol_type = other DNA
tcatgtgatgtaacgctt

SEQ ID NO: 31640 - DNA, 18 bp, synthetic construct
  source 1..18: mol_type = other DNA
ctcatgtgatgtaacgct

SEQ ID NO: 31641 - DNA, 18 bp, synthetic construct
  source 1..18: mol_type = other DNA
actcatgtgatgtaacgc

SEQ ID NO: 31642 - DNA, 18 bp, synthetic construct
  source 1..18: mol_type = other DNA
gatcactcatgtgatgta

SEQ ID NO: 31643 - DNA, 18 bp, synthetic construct
  source 1..18: mol_type = other DNA
tgatcactcatgtgatgt

SEQ ID NO: 31644 - DNA, 18 bp, synthetic construct
  source 1..18: mol_type = other DNA
atgatcactcatgtgatg

SEQ ID NO: 31645 - DNA, 18 bp, synthetic construct
  source 1..18: mol_type = other DNA
gcaatgatcactcatgtg

SEQ ID NO: 31646 - DNA, 18 bp, synthetic construct
  source 1..18: mol_type = other DNA
tgcaatgatcactcatgt

SEQ ID NO: 31647 - DNA, 18 bp, synthetic construct
  source 1..18: mol_type = other DNA
ctgcaatgatcactcatg

SEQ ID NO: 31648 - DNA, 18 bp, synthetic construct
  source 1..18: mol_type = other DNA
tctgcaatgatcactcat

SEQ ID NO: 31649 - DNA, 18 bp, synthetic construct
  source 1..18: mol_type = other DNA
ctctgcaatgatcactca

SEQ ID NO: 31650 - DNA, 18 bp, synthetic construct
  source 1..18: mol_type = other DNA
actctgcaatgatcactc

SEQ ID NO: 31651 - DNA, 18 bp, synthetic construct
  source 1..18: mol_type = other DNA
aactctgcaatgatcact

SEQ ID NO: 31652 - DNA, 18 bp, synthetic construct
  source 1..18: mol_type = other DNA
gtgacataactctgcaat

SEQ ID NO: 31653 - DNA, 18 bp, synthetic construct
  source 1..18: mol_type = other DNA
agtgacataactctgcaa

SEQ ID NO: 31654 - DNA, 18 bp, synthetic construct
  source 1..18: mol_type = other DNA
tagtgacataactctgca

SEQ ID NO: 31655 - DNA, 18 bp, synthetic construct
  source 1..18: mol_type = other DNA
atagtgacataactctgc

SEQ ID NO: 31656 - DNA, 18 bp, synthetic construct
  source 1..18: mol_type = other DNA
gcatagtgacataactct

SEQ ID NO: 31657 - DNA, 18 bp, synthetic construct
  source 1..18: mol_type = other DNA
ggcatagtgacataactc

SEQ ID NO: 31658 - DNA, 18 bp, synthetic construct
  source 1..18: mol_type = other DNA
gggcatagtgacataact

SEQ ID NO: 31659 - DNA, 18 bp, synthetic construct
  source 1..18: mol_type = other DNA
ggggcatagtgacataac

SEQ ID NO: 31660 - DNA, 18 bp, synthetic construct
  source 1..18: mol_type = other DNA
gggggcatagtgacataa

SEQ ID NO: 31661 - DNA, 18 bp, synthetic construct
  source 1..18: mol_type = other DNA
tgggggcatagtgacata

SEQ ID NO: 31662 - DNA, 18 bp, synthetic construct
  source 1..18: mol_type = other DNA
atgggggcatagtgacat

SEQ ID NO: 31663 - DNA, 18 bp, synthetic construct
  source 1..18: mol_type = other DNA
tatgggggcatagtgaca

SEQ ID NO: 31664 - DNA, 18 bp, synthetic construct
  source 1..18: mol_type = other DNA
ctatgggggcatagtgac

SEQ ID NO: 31665 - DNA, 18 bp, synthetic construct
  source 1..18: mol_type = other DNA
cctatgggggcatagtga

SEQ ID NO: 31666 - DNA, 18 bp, synthetic construct
  source 1..18: mol_type = other DNA
gcctatgggggcatagtg

SEQ ID NO: 31667 - DNA, 18 bp, synthetic construct
  source 1..18: mol_type = other DNA
tgcctatgggggcatagt

SEQ ID NO: 31668 - DNA, 18 bp, synthetic construct
  source 1..18: mol_type = other DNA
ctgcctatgggggcatag

SEQ ID NO: 31669 - DNA, 18 bp, synthetic construct
  source 1..18: mol_type = other DNA
tctgcctatgggggcata

SEQ ID NO: 31670 - DNA, 18 bp, synthetic construct
  source 1..18: mol_type = other DNA
atctgcctatgggggcat

SEQ ID NO: 31671 - DNA, 18 bp, synthetic construct
  source 1..18: mol_type = other DNA
gatctgcctatgggggca

SEQ ID NO: 31672 - DNA, 18 bp, synthetic construct
  source 1..18: mol_type = other DNA
tggatctgcctatggggg

SEQ ID NO: 31673 - DNA, 18 bp, synthetic construct
  source 1..18: mol_type = other DNA
ttggatctgcctatgggg

SEQ ID NO: 31674 - DNA, 18 bp, synthetic construct
  source 1..18: mol_type = other DNA
cttggatctgcctatggg

SEQ ID NO: 31675 - DNA, 18 bp, synthetic construct
  source 1..18: mol_type = other DNA
tcttggatctgcctatgg

SEQ ID NO: 31676 - DNA, 18 bp, synthetic construct
  source 1..18: mol_type = other DNA
gtcttggatctgcctatg

SEQ ID NO: 31677 - DNA, 18 bp, synthetic construct
  source 1..18: mol_type = other DNA
tgtcttggatctgcctat

SEQ ID NO: 31678 - DNA, 18 bp, synthetic construct
  source 1..18: mol_type = other DNA
ttgtcttggatctgccta

SEQ ID NO: 31679 - DNA, 18 bp, synthetic construct
  source 1..18: mol_type = other DNA
cttgtcttggatctgcct

SEQ ID NO: 31680 - DNA, 18 bp, synthetic construct
  source 1..18: mol_type = other DNA
tcttgtcttggatctgcc

SEQ ID NO: 31681 - DNA, 18 bp, synthetic construct
  source 1..18: mol_type = other DNA
ctcttgtcttggatctgc

SEQ ID NO: 31682 - DNA, 18 bp, synthetic construct
  source 1..18: mol_type = other DNA
actcttgtcttggatctg

SEQ ID NO: 31683 - DNA, 18 bp, synthetic construct
  source 1..18: mol_type = other DNA
gactcttgtcttggatct

SEQ ID NO: 31684 - DNA, 18 bp, synthetic construct
  source 1..18: mol_type = other DNA
ggactcttgtcttggatc

SEQ ID NO: 31685 - DNA, 18 bp, synthetic construct
  source 1..18: mol_type = other DNA
tggactcttgtcttggat

SEQ ID NO: 31686 - DNA, 18 bp, synthetic construct
  source 1..18: mol_type = other DNA
atggactcttgtcttgga

SEQ ID NO: 31687 - DNA, 18 bp, synthetic construct
  source 1..18: mol_type = other DNA
gatggactcttgtcttgg

SEQ ID NO: 31688 - DNA, 18 bp, synthetic construct
  source 1..18: mol_type = other DNA
tgatggactcttgtcttg

SEQ ID NO: 31689 - DNA, 18 bp, synthetic construct
  source 1..18: mol_type = other DNA
gtgatggactcttgtctt

SEQ ID NO: 31690 - DNA, 18 bp, synthetic construct
  source 1..18: mol_type = other DNA
ggtgatggactcttgtct

SEQ ID NO: 31691 - DNA, 18 bp, synthetic construct
  source 1..18: mol_type = other DNA
aggtgatggactcttgtc

SEQ ID NO: 31692 - DNA, 18 bp, synthetic construct
  source 1..18: mol_type = other DNA
caggtgatggactcttgt

SEQ ID NO: 31693 - DNA, 18 bp, synthetic construct
  source 1..18: mol_type = other DNA
ccaggtgatggactcttg

SEQ ID NO: 31694 - DNA, 18 bp, synthetic construct
  source 1..18: mol_type = other DNA
cccaggtgatggactctt

SEQ ID NO: 31695 - DNA, 18 bp, synthetic construct
  source 1..18: mol_type = other DNA
acccaggtgatggactct

SEQ ID NO: 31696 - DNA, 18 bp, synthetic construct
  source 1..18: mol_type = other DNA
cacccaggtgatggactc

SEQ ID NO: 31697 - DNA, 18 bp, synthetic construct
  source 1..18: mol_type = other DNA
tcacccaggtgatggact

SEQ ID NO: 31698 - DNA, 18 bp, synthetic construct
  source 1..18: mol_type = other DNA
ttctgcactgatcaccca

SEQ ID NO: 31699 - DNA, 18 bp, synthetic construct
  source 1..18: mol_type = other DNA
tttctgcactgatcaccc

SEQ ID NO: 31700 - DNA, 18 bp, synthetic construct
  source 1..18: mol_type = other DNA
atttctgcactgatcacc

SEQ ID NO: 31701 - DNA, 18 bp, synthetic construct
  source 1..18: mol_type = other DNA
tatttctgcactgatcac

SEQ ID NO: 31702 - DNA, 18 bp, synthetic construct
  source 1..18: mol_type = other DNA
atatttctgcactgatca

SEQ ID NO: 31703 - DNA, 18 bp, synthetic construct
  source 1..18: mol_type = other DNA
catatttctgcactgatc

SEQ ID NO: 31704 - DNA, 18 bp, synthetic construct
  source 1..18: mol_type = other DNA
gcatatttctgcactgat

SEQ ID NO: 31705 - DNA, 18 bp, synthetic construct
  source 1..18: mol_type = other DNA
ggcatatttctgcactga

SEQ ID NO: 31706 - DNA, 18 bp, synthetic construct
  source 1..18: mol_type = other DNA
tggcatatttctgcactg

SEQ ID NO: 31707 - DNA, 18 bp, synthetic construct
  source 1..18: mol_type = other DNA
gtggcatatttctgcact

SEQ ID NO: 31708 - DNA, 18 bp, synthetic construct
  source 1..18: mol_type = other DNA
tgtggcatatttctgcac

SEQ ID NO: 31709 - DNA, 18 bp, synthetic construct
  source 1..18: mol_type = other DNA
ttgtggcatatttctgca

SEQ ID NO: 31710 - DNA, 18 bp, synthetic construct
  source 1..18: mol_type = other DNA
attgtggcatatttctgc

SEQ ID NO: 31711 - DNA, 18 bp, synthetic construct
  source 1..18: mol_type = other DNA
cattgtggcatatttctg

SEQ ID NO: 31712 - DNA, 18 bp, synthetic construct
  source 1..18: mol_type = other DNA
gcattgtggcatatttct

SEQ ID NO: 31713 - DNA, 18 bp, synthetic construct
  source 1..18: mol_type = other DNA
ggcattgtggcatatttc

SEQ ID NO: 31714 - DNA, 18 bp, synthetic construct
  source 1..18: mol_type = other DNA
cggcattgtggcatattt

SEQ ID NO: 31715 - DNA, 18 bp, synthetic construct
  source 1..18: mol_type = other DNA
gcggcattgtggcatatt

SEQ ID NO: 31716 - DNA, 18 bp, synthetic construct
  source 1..18: mol_type = other DNA
ggcggcattgtggcatat

SEQ ID NO: 31717 - DNA, 18 bp, synthetic construct
  source 1..18: mol_type = other DNA
tggcggcattgtggcata

SEQ ID NO: 31718 - DNA, 18 bp, synthetic construct
  source 1..18: mol_type = other DNA
ctggcggcattgtggcat

SEQ ID NO: 31719 - DNA, 18 bp, synthetic construct
  source 1..18: mol_type = other DNA
actggcggcattgtggca

SEQ ID NO: 31720 - DNA, 18 bp, synthetic construct
  source 1..18: mol_type = other DNA
tactggcggcattgtggc

SEQ ID NO: 31721 - DNA, 18 bp, synthetic construct
  source 1..18: mol_type = other DNA
ctactggcggcattgtgg

SEQ ID NO: 31722 - DNA, 18 bp, synthetic construct
  source 1..18: mol_type = other DNA
cctactggcggcattgtg

SEQ ID NO: 31723 - DNA, 18 bp, synthetic construct
  source 1..18: mol_type = other DNA
gcctactggcggcattgt

SEQ ID NO: 31724 - DNA, 18 bp, synthetic construct
  source 1..18: mol_type = other DNA
tgcctactggcggcattg

SEQ ID NO: 31725 - DNA, 18 bp, synthetic construct
  source 1..18: mol_type = other DNA
ctgcctactggcggcatt

SEQ ID NO: 31726 - DNA, 18 bp, synthetic construct
  source 1..18: mol_type = other DNA
tctgcctactggcggcat

SEQ ID NO: 31727 - DNA, 18 bp, synthetic construct
  source 1..18: mol_type = other DNA
atctgcctactggcggca

SEQ ID NO: 31728 - DNA, 18 bp, synthetic construct
  source 1..18: mol_type = other DNA
tatctgcctactggcggc

SEQ ID NO: 31729 - DNA, 18 bp, synthetic construct
  source 1..18: mol_type = other DNA
atatctgcctactggcgg

SEQ ID NO: 31730 - DNA, 18 bp, synthetic construct
  source 1..18: mol_type = other DNA
tatatctgcctactggcg

SEQ ID NO: 31731 - DNA, 18 bp, synthetic construct
  source 1..18: mol_type = other DNA
ctatatctgcctactggc

SEQ ID NO: 31732 - DNA, 18 bp, synthetic construct
  source 1..18: mol_type = other DNA
tctatatctgcctactgg

SEQ ID NO: 31733 - DNA, 18 bp, synthetic construct
  source 1..18: mol_type = other DNA
gtctatatctgcctactg

SEQ ID NO: 31734 - DNA, 18 bp, synthetic construct
  source 1..18: mol_type = other DNA
tgtctatatctgcctact

SEQ ID NO: 31735 - DNA, 18 bp, synthetic construct
  source 1..18: mol_type = other DNA
ttgtctatatctgcctac

SEQ ID NO: 31736 - DNA, 18 bp, synthetic construct
  source 1..18: mol_type = other DNA
cttgtctatatctgccta

SEQ ID NO: 31737 - DNA, 18 bp, synthetic construct
  source 1..18: mol_type = other DNA
tcttgtctatatctgcct

SEQ ID NO: 31738 - DNA, 18 bp, synthetic construct
  source 1..18: mol_type = other DNA
ctcttgtctatatctgcc

SEQ ID NO: 31739 - DNA, 18 bp, synthetic construct
  source 1..18: mol_type = other DNA
actcttgtctatatctgc

SEQ ID NO: 31740 - DNA, 18 bp, synthetic construct
  source 1..18: mol_type = other DNA
gatgtaactcttgtctat

SEQ ID NO: 31741 - DNA, 18 bp, synthetic construct
  source 1..18: mol_type = other DNA
gcaggtgatgtaactctt

SEQ ID NO: 31742 - DNA, 18 bp, synthetic construct
  source 1..18: mol_type = other DNA
cgcaggtgatgtaactct

SEQ ID NO: 31743 - DNA, 18 bp, synthetic construct
  source 1..18: mol_type = other DNA
acgcaggtgatgtaactc

SEQ ID NO: 31744 - DNA, 18 bp, synthetic construct
  source 1..18: mol_type = other DNA
cacgcaggtgatgtaact

SEQ ID NO: 31745 - DNA, 18 bp, synthetic construct
  source 1..18: mol_type = other DNA
tcacgcaggtgatgtaac

SEQ ID NO: 31746 - DNA, 18 bp, synthetic construct
  source 1..18: mol_type = other DNA
atcacgcaggtgatgtaa

SEQ ID NO: 31747 - DNA, 18 bp, synthetic construct
  source 1..18: mol_type = other DNA
gatcacgcaggtgatgta

SEQ ID NO: 31748 - DNA, 18 bp, synthetic construct
  source 1..18: mol_type = other DNA
tgatcacgcaggtgatgt

SEQ ID NO: 31749 - DNA, 18 bp, synthetic construct
  source 1..18: mol_type = other DNA
gtgatcacgcaggtgatg

SEQ ID NO: 31750 - DNA, 18 bp, synthetic construct
  source 1..18: mol_type = other DNA
agtgatcacgcaggtgat

SEQ ID NO: 31751 - DNA, 18 bp, synthetic construct
  source 1..18: mol_type = other DNA
cagtgatcacgcaggtga

SEQ ID NO: 31752 - DNA, 18 bp, synthetic construct
  source 1..18: mol_type = other DNA
gcagtgatcacgcaggtg

SEQ ID NO: 31753 - DNA, 18 bp, synthetic construct
  source 1..18: mol_type = other DNA
tgcagtgatcacgcaggt

SEQ ID NO: 31754 - DNA, 18 bp, synthetic construct
  source 1..18: mol_type = other DNA
ctgcagtgatcacgcagg

SEQ ID NO: 31755 - DNA, 18 bp, synthetic construct
  source 1..18: mol_type = other DNA
tctgcagtgatcacgcag

SEQ ID NO: 31756 - DNA, 18 bp, synthetic construct
  source 1..18: mol_type = other DNA
ctctgcagtgatcacgca

SEQ ID NO: 31757 - DNA, 18 bp, synthetic construct
  source 1..18: mol_type = other DNA
tctctgcagtgatcacgc

SEQ ID NO: 31758 - DNA, 18 bp, synthetic construct
  source 1..18: mol_type = other DNA
atctctgcagtgatcacg

SEQ ID NO: 31759 - DNA, 18 bp, synthetic construct
  source 1..18: mol_type = other DNA
tatctctgcagtgatcac

SEQ ID NO: 31760 - DNA, 18 bp, synthetic construct
  source 1..18: mol_type = other DNA
atatctctgcagtgatca

SEQ ID NO: 31761 - DNA, 18 bp, synthetic construct
  source 1..18: mol_type = other DNA
tatatctctgcagtgatc

SEQ ID NO: 31762 - DNA, 18 bp, synthetic construct
  source 1..18: mol_type = other DNA
atatatctctgcagtgat

SEQ ID NO: 31763 - DNA, 18 bp, synthetic construct
  source 1..18: mol_type = other DNA
gatatatctctgcagtga

SEQ ID NO: 31764 - DNA, 18 bp, synthetic construct
  source 1..18: mol_type = other DNA
tgatatatctctgcagtg

SEQ ID NO: 31765 - DNA, 18 bp, synthetic construct
  source 1..18: mol_type = other DNA
gtgatatatctctgcagt

SEQ ID NO: 31766 - DNA, 18 bp, synthetic construct
  source 1..18: mol_type = other DNA
tgtgatatatctctgcag

SEQ ID NO: 31767 - DNA, 18 bp, synthetic construct
  source 1..18: mol_type = other DNA
ttgtgatatatctctgca

SEQ ID NO: 31768 - DNA, 18 bp, synthetic construct
  source 1..18: mol_type = other DNA
attgtgatatatctctgc

SEQ ID NO: 31769 - DNA, 18 bp, synthetic construct
  source 1..18: mol_type = other DNA
gcattgtgatatatctct

SEQ ID NO: 31770 - DNA, 18 bp, synthetic construct
  source 1..18: mol_type = other DNA
ggcattgtgatatatctc

SEQ ID NO: 31771 - DNA, 18 bp, synthetic construct
  source 1..18: mol_type = other DNA
gggcattgtgatatatct

SEQ ID NO: 31772 - DNA, 18 bp, synthetic construct
  source 1..18: mol_type = other DNA
ggggcattgtgatatatc

SEQ ID NO: 31773 - DNA, 18 bp, synthetic construct
  source 1..18: mol_type = other DNA
aggggcattgtgatatat

SEQ ID NO: 31774 - DNA, 18 bp, synthetic construct
  source 1..18: mol_type = other DNA
caggggcattgtgatata

SEQ ID NO: 31775 - DNA, 18 bp, synthetic construct
  source 1..18: mol_type = other DNA
acaggggcattgtgatat

SEQ ID NO: 31776 - DNA, 18 bp, synthetic construct
  source 1..18: mol_type = other DNA
tacaggggcattgtgata

SEQ ID NO: 31777 - DNA, 18 bp, synthetic construct
  source 1..18: mol_type = other DNA
ctacaggggcattgtgat

SEQ ID NO: 31778 - DNA, 18 bp, synthetic construct
  source 1..18: mol_type = other DNA
gactcttgtctaggctct

SEQ ID NO: 31779 - DNA, 18 bp, synthetic construct
  source 1..18: mol_type = other DNA
ggactcttgtctaggctc

SEQ ID NO: 31780 - DNA, 18 bp, synthetic construct
  source 1..18: mol_type = other DNA
gggactcttgtctaggct

SEQ ID NO: 31781 - DNA, 18 bp, synthetic construct
  source 1..18: mol_type = other DNA
tgggactcttgtctaggc

SEQ ID NO: 31782 - DNA, 18 bp, synthetic construct
  source 1..18: mol_type = other DNA
atgggactcttgtctagg

SEQ ID NO: 31783 - DNA, 18 bp, synthetic construct
  source 1..18: mol_type = other DNA
gatgggactcttgtctag

SEQ ID NO: 31784 - DNA, 18 bp, synthetic construct
  source 1..18: mol_type = other DNA
tgatgggactcttgtcta

SEQ ID NO: 31785 - DNA, 18 bp, synthetic construct
  source 1..18: mol_type = other DNA
gtgatgggactcttgtct

SEQ ID NO: 31786 - DNA, 18 bp, synthetic construct
  source 1..18: mol_type = other DNA
ggtgatgggactcttgtc

SEQ ID NO: 31787 - DNA, 18 bp, synthetic construct
  source 1..18: mol_type = other DNA
aggtgatgggactcttgt

SEQ ID NO: 31788 - DNA, 18 bp, synthetic construct
  source 1..18: mol_type = other DNA
caggtgatgggactcttg

SEQ ID NO: 31789 - DNA, 18 bp, synthetic construct
  source 1..18: mol_type = other DNA
actctgcactgatcaccc

SEQ ID NO: 31790 - DNA, 18 bp, synthetic construct
  source 1..18: mol_type = other DNA
aactctgcactgatcacc

SEQ ID NO: 31791 - DNA, 18 bp, synthetic construct
  source 1..18: mol_type = other DNA
taactctgcactgatcac

SEQ ID NO: 31792 - DNA, 18 bp, synthetic construct
  source 1..18: mol_type = other DNA
ataactctgcactgatca

SEQ ID NO: 31793 - DNA, 18 bp, synthetic construct
  source 1..18: mol_type = other DNA
cataactctgcactgatc

SEQ ID NO: 31794 - DNA, 18 bp, synthetic construct
  source 1..18: mol_type = other DNA
acataactctgcactgat

SEQ ID NO: 31795 - DNA, 18 bp, synthetic construct
  source 1..18: mol_type = other DNA
gacataactctgcactga

SEQ ID NO: 31796 - DNA, 18 bp, synthetic construct
  source 1..18: mol_type = other DNA
tgacataactctgcactg

SEQ ID NO: 31797 - DNA, 18 bp, synthetic construct
  source 1..18: mol_type = other DNA
gtgacataactctgcact

SEQ ID NO: 31798 - DNA, 18 bp, synthetic construct
  source 1..18: mol_type = other DNA
tgtgacataactctgcac

SEQ ID NO: 31799 - DNA, 18 bp, synthetic construct
  source 1..18: mol_type = other DNA
ttgtgacataactctgca

SEQ ID NO: 31800 - DNA, 18 bp, synthetic construct
  source 1..18: mol_type = other DNA
attgtgacataactctgc

SEQ ID NO: 31801 - DNA, 18 bp, synthetic construct
  source 1..18: mol_type = other DNA
gcattgtgacataactct

SEQ ID NO: 31802 - DNA, 18 bp, synthetic construct
  source 1..18: mol_type = other DNA
ggcattgtgacataactc

SEQ ID NO: 31803 - DNA, 18 bp, synthetic construct
  source 1..18: mol_type = other DNA
gggcattgtgacataact

SEQ ID NO: 31804 - DNA, 18 bp, synthetic construct
  source 1..18: mol_type = other DNA
ggggcattgtgacataac

SEQ ID NO: 31805 - DNA, 18 bp, synthetic construct
  source 1..18: mol_type = other DNA
gggggcattgtgacataa

SEQ ID NO: 31806 - DNA, 18 bp, synthetic construct
  source 1..18: mol_type = other DNA
agggggcattgtgacata

SEQ ID NO: 31807 - DNA, 18 bp, synthetic construct
  source 1..18: mol_type = other DNA
aagggggcattgtgacat

SEQ ID NO: 31808 - DNA, 18 bp, synthetic construct
  source 1..18: mol_type = other DNA
aaagggggcattgtgaca

SEQ ID NO: 31809 - DNA, 18 bp, synthetic construct
  source 1..18: mol_type = other DNA
aaaagggggcattgtgac

SEQ ID NO: 31810 - DNA, 18 bp, synthetic construct
  source 1..18: mol_type = other DNA
caaaagggggcattgtga

SEQ ID NO: 31811 - DNA, 18 bp, synthetic construct
  source 1..18: mol_type = other DNA
ccaaaagggggcattgtg

SEQ ID NO: 31812 - DNA, 18 bp, synthetic construct
  source 1..18: mol_type = other DNA
gccaaaagggggcattgt

SEQ ID NO: 31813 - DNA, 18 bp, synthetic construct
  source 1..18: mol_type = other DNA
tgccaaaagggggcattg

SEQ ID NO: 31814 - DNA, 18 bp, synthetic construct
  source 1..18: mol_type = other DNA
ctgccaaaagggggcatt

SEQ ID NO: 31815 - DNA, 18 bp, synthetic construct
  source 1..18: mol_type = other DNA
tctgccaaaagggggcat

SEQ ID NO: 31816 - DNA, 18 bp, synthetic construct
  source 1..18: mol_type = other DNA
ctctgccaaaagggggca

SEQ ID NO: 31817 - DNA, 18 bp, synthetic construct
  source 1..18: mol_type = other DNA
gctctgccaaaagggggc

SEQ ID NO: 31818 - DNA, 18 bp, synthetic construct
  source 1..18: mol_type = other DNA
ggctctgccaaaaggggg

SEQ ID NO: 31819 - DNA, 18 bp, synthetic construct
  source 1..18: mol_type = other DNA
aggctctgccaaaagggg

SEQ ID NO: 31820 - DNA, 18 bp, synthetic construct
  source 1..18: mol_type = other DNA
taggctctgccaaaaggg

SEQ ID NO: 31821 - DNA, 18 bp, synthetic construct
  source 1..18: mol_type = other DNA
ctaggctctgccaaaagg

SEQ ID NO: 31822 - DNA, 18 bp, synthetic construct
  source 1..18: mol_type = other DNA
tctaggctctgccaaaag

SEQ ID NO: 31823 - DNA, 18 bp, synthetic construct
  source 1..18: mol_type = other DNA
gtctaggctctgccaaaa

SEQ ID NO: 31824 - DNA, 18 bp, synthetic construct
  source 1..18: mol_type = other DNA
tgtctaggctctgccaaa

SEQ ID NO: 31825 - DNA, 18 bp, synthetic construct
  source 1..18: mol_type = other DNA
ttgtctaggctctgccaa

SEQ ID NO: 31826 - DNA, 18 bp, synthetic construct
  source 1..18: mol_type = other DNA
cttgtctaggctctgcca

SEQ ID NO: 31827 - DNA, 18 bp, synthetic construct
  source 1..18: mol_type = other DNA
acccttgtctaggctctg

SEQ ID NO: 31828 - DNA, 18 bp, synthetic construct
  source 1..18: mol_type = other DNA
aacccttgtctaggctct

SEQ ID NO: 31829 - DNA, 18 bp, synthetic construct
  source 1..18: mol_type = other DNA
taacccttgtctaggctc

SEQ ID NO: 31830 - DNA, 18 bp, synthetic construct
  source 1..18: mol_type = other DNA
gtaacccttgtctaggct

SEQ ID NO: 31831 - DNA, 18 bp, synthetic construct
  source 1..18: mol_type = other DNA
tgtaacccttgtctaggc

SEQ ID NO: 31832 - DNA, 18 bp, synthetic construct
  source 1..18: mol_type = other DNA
atgtaacccttgtctagg

SEQ ID NO: 31833 - DNA, 18 bp, synthetic construct
  source 1..18: mol_type = other DNA
gatgtaacccttgtctag

SEQ ID NO: 31834 - DNA, 18 bp, synthetic construct
  source 1..18: mol_type = other DNA
tgatgtaacccttgtcta

SEQ ID NO: 31835 - DNA, 18 bp, synthetic construct
  source 1..18: mol_type = other DNA
gtgatgtaacccttgtct

SEQ ID NO: 31836 - DNA, 18 bp, synthetic construct
  source 1..18: mol_type = other DNA
ccaggtgatgtaaccctt

SEQ ID NO: 31837 - DNA, 18 bp, synthetic construct
  source 1..18: mol_type = other DNA
cccaggtgatgtaaccct

SEQ ID NO: 31838 - DNA, 18 bp, synthetic construct
  source 1..18: mol_type = other DNA
acccaggtgatgtaaccc

SEQ ID NO: 31839 - DNA, 18 bp, synthetic construct
  source 1..18: mol_type = other DNA
cacccaggtgatgtaacc

SEQ ID NO: 31840 - DNA, 18 bp, synthetic construct
  source 1..18: mol_type = other DNA
cattgtgacatatctctg

SEQ ID NO: 31841 - DNA, 18 bp, synthetic construct
  source 1..18: mol_type = other DNA
acattgtgacatatctct

SEQ ID NO: 31842 - DNA, 18 bp, synthetic construct
  source 1..18: mol_type = other DNA
gacattgtgacatatctc

SEQ ID NO: 31843 - DNA, 18 bp, synthetic construct
  source 1..18: mol_type = other DNA
ggacattgtgacatatct

SEQ ID NO: 31844 - DNA, 18 bp, synthetic construct
  source 1..18: mol_type = other DNA
gggacattgtgacatatc

SEQ ID NO: 31845 - DNA, 18 bp, synthetic construct
  source 1..18: mol_type = other DNA
agggacattgtgacatat

SEQ ID NO: 31846 - DNA, 18 bp, synthetic construct
  source 1..18: mol_type = other DNA
cagggacattgtgacata

SEQ ID NO: 31847 - DNA, 18 bp, synthetic construct
  source 1..18: mol_type = other DNA
acagggacattgtgacat

SEQ ID NO: 31848 - DNA, 18 bp, synthetic construct
  source 1..18: mol_type = other DNA
tacagggacattgtgaca

SEQ ID NO: 31849 - DNA, 18 bp, synthetic construct
  source 1..18: mol_type = other DNA
ctacagggacattgtgac

SEQ ID NO: 31850 - DNA, 18 bp, synthetic construct
  source 1..18: mol_type = other DNA
gctacagggacattgtga

SEQ ID NO: 31851 - DNA, 18 bp, synthetic construct
  source 1..18: mol_type = other DNA
ggctacagggacattgtg

SEQ ID NO: 31852 - DNA, 18 bp, synthetic construct
  source 1..18: mol_type = other DNA
tggctacagggacattgt

SEQ ID NO: 31853 - DNA, 18 bp, synthetic construct
  source 1..18: mol_type = other DNA
atggctacagggacattg

SEQ ID NO: 31854 - DNA, 18 bp, synthetic construct
  source 1..18: mol_type = other DNA
tatggctacagggacatt

SEQ ID NO: 31855 - DNA, 18 bp, synthetic construct
  source 1..18: mol_type = other DNA
atatggctacagggacat

SEQ ID NO: 31856 - DNA, 18 bp, synthetic construct
  source 1..18: mol_type = other DNA
gatatggctacagggaca

SEQ ID NO: 31857 - DNA, 18 bp, synthetic construct
  source 1..18: mol_type = other DNA
ggatatggctacagggac

SEQ ID NO: 31858 - DNA, 18 bp, synthetic construct
  source 1..18: mol_type = other DNA
aggatatggctacaggga

SEQ ID NO: 31859 - DNA, 18 bp, synthetic construct
  source 1..18: mol_type = other DNA
aaggatatggctacaggg

SEQ ID NO: 31860 - DNA, 18 bp, synthetic construct
  source 1..18: mol_type = other DNA
caaggatatggctacagg

SEQ ID NO: 31861 - DNA, 18 bp, synthetic construct
  source 1..18: mol_type = other DNA
tcaaggatatggctacag

SEQ ID NO: 31862 - DNA, 18 bp, synthetic construct
  source 1..18: mol_type = other DNA
gtcaaggatatggctaca

SEQ ID NO: 31863 - DNA, 18 bp, synthetic construct
  source 1..18: mol_type = other DNA
tgtcaaggatatggctac

SEQ ID NO: 31864 - DNA, 18 bp, synthetic construct
  source 1..18: mol_type = other DNA
ttgtcaaggatatggcta

SEQ ID NO: 31865 - DNA, 18 bp, synthetic construct
  source 1..18: mol_type = other DNA
tttgtcaaggatatggct

SEQ ID NO: 31866 - DNA, 18 bp, synthetic construct
  source 1..18: mol_type = other DNA
ttttgtcaaggatatggc

SEQ ID NO: 31867 - DNA, 18 bp, synthetic construct
  source 1..18: mol_type = other DNA
tcacttttgtcaaggata

SEQ ID NO: 31868 - DNA, 18 bp, synthetic construct
  source 1..18: mol_type = other DNA
gtcacttttgtcaaggat

SEQ ID NO: 31869 - DNA, 18 bp, synthetic construct
  source 1..18: mol_type = other DNA
tgtcacttttgtcaagga

SEQ ID NO: 31870 - DNA, 18 bp, synthetic construct
  source 1..18: mol_type = other DNA
atgtcacttttgtcaagg

SEQ ID NO: 31871 - DNA, 18 bp, synthetic construct
  source 1..18: mol_type = other DNA
gatgtcacttttgtcaag

SEQ ID NO: 31872 - DNA, 18 bp, synthetic construct
  source 1..18: mol_type = other DNA
tgatgtcacttttgtcaa

SEQ ID NO: 31873 - DNA, 18 bp, synthetic construct
  source 1..18: mol_type = other DNA
gtgatgtcacttttgtca

SEQ ID NO: 31874 - DNA, 18 bp, synthetic construct
  source 1..18: mol_type = other DNA
ggtgatgtcacttttgtc

SEQ ID NO: 31875 - DNA, 18 bp, synthetic construct
  source 1..18: mol_type = other DNA
aggtgatgtcacttttgt

SEQ ID NO: 31876 - DNA, 18 bp, synthetic construct
  source 1..18: mol_type = other DNA
caggtgatgtcacttttg

SEQ ID NO: 31877 - DNA, 18 bp, synthetic construct
  source 1..18: mol_type = other DNA
ccaggtgatgtcactttt

SEQ ID NO: 31878 - DNA, 18 bp, synthetic construct
  source 1..18: mol_type = other DNA
cccaggtgatgtcacttt

SEQ ID NO: 31879 - DNA, 18 bp, synthetic construct
  source 1..18: mol_type = other DNA
acccaggtgatgtcactt

SEQ ID NO: 31880 - DNA, 18 bp, synthetic construct
  source 1..18: mol_type = other DNA
cacccaggtgatgtcact

SEQ ID NO: 31881 - DNA, 18 bp, synthetic construct
  source 1..18: mol_type = other DNA
tcacccaggtgatgtcac

SEQ ID NO: 31882 - DNA, 18 bp, synthetic construct
  source 1..18: mol_type = other DNA
atcacccaggtgatgtca

SEQ ID NO: 31883 - DNA, 18 bp, synthetic construct
  source 1..18: mol_type = other DNA
gatcacccaggtgatgtc

SEQ ID NO: 31884 - DNA, 18 bp, synthetic construct
  source 1..18: mol_type = other DNA
acactgatcacccaggtg

SEQ ID NO: 31885 - DNA, 18 bp, synthetic construct
  source 1..18: mol_type = other DNA
cacactgatcacccaggt

SEQ ID NO: 31886 - DNA, 18 bp, synthetic construct
  source 1..18: mol_type = other DNA
ccacactgatcacccagg

SEQ ID NO: 31887 - DNA, 18 bp, synthetic construct
  source 1..18: mol_type = other DNA
tccacactgatcacccag

SEQ ID NO: 31888 - DNA, 18 bp, synthetic construct
  source 1..18: mol_type = other DNA
ctccacactgatcaccca

SEQ ID NO: 31889 - DNA, 18 bp, synthetic construct
  source 1..18: mol_type = other DNA
tctccacactgatcaccc

SEQ ID NO: 31890 - DNA, 18 bp, synthetic construct
  source 1..18: mol_type = other DNA
atctccacactgatcacc

SEQ ID NO: 31891 - DNA, 18 bp, synthetic construct
  source 1..18: mol_type = other DNA
tatctccacactgatcac

SEQ ID NO: 31892 - DNA, 18 bp, synthetic construct
  source 1..18: mol_type = other DNA
atatctccacactgatca

SEQ ID NO: 31893 - DNA, 18 bp, synthetic construct
  source 1..18: mol_type = other DNA
catatctccacactgatc

SEQ ID NO: 31894 - DNA, 18 bp, synthetic construct
  source 1..18: mol_type = other DNA
acatatctccacactgat

SEQ ID NO: 31895 - DNA, 18 bp, synthetic construct
  source 1..18: mol_type = other DNA
gacatatctccacactga

SEQ ID NO: 31896 - DNA, 18 bp, synthetic construct
  source 1..18: mol_type = other DNA
tgacatatctccacactg

SEQ ID NO: 31897 - DNA, 18 bp, synthetic construct
  source 1..18: mol_type = other DNA
gtgacatatctccacact

SEQ ID NO: 31898 - DNA, 18 bp, synthetic construct
  source 1..18: mol_type = other DNA
tgtgacatatctccacac

SEQ ID NO: 31899 - DNA, 18 bp, synthetic construct
  source 1..18: mol_type = other DNA
ttgtgacatatctccaca

SEQ ID NO: 31900 - DNA, 18 bp, synthetic construct
  source 1..18: mol_type = other DNA
attgtgacatatctccac

SEQ ID NO: 31901 - DNA, 18 bp, synthetic construct
  source 1..18: mol_type = other DNA
cattgtgacatatctcca

SEQ ID NO: 31902 - DNA, 18 bp, synthetic construct
  source 1..18: mol_type = other DNA
acattgtgacatatctcc

SEQ ID NO: 31903 - DNA, 18 bp, synthetic construct
  source 1..18: mol_type = other DNA
ggagacattgtgacatat

SEQ ID NO: 31904 - DNA, 18 bp, synthetic construct
  source 1..18: mol_type = other DNA
tggagacattgtgacata

SEQ ID NO: 31905 - DNA, 18 bp, synthetic construct
  source 1..18: mol_type = other DNA
ctggagacattgtgacat

SEQ ID NO: 31906 - DNA, 18 bp, synthetic construct
  source 1..18: mol_type = other DNA
actggagacattgtgaca

SEQ ID NO: 31907 - DNA, 18 bp, synthetic construct
  source 1..18: mol_type = other DNA
tactggagacattgtgac

SEQ ID NO: 31908 - DNA, 18 bp, synthetic construct
  source 1..18: mol_type = other DNA
ctactggagacattgtga

SEQ ID NO: 31909 - DNA, 18 bp, synthetic construct
  source 1..18: mol_type = other DNA
cctactggagacattgtg

SEQ ID NO: 31910 - DNA, 18 bp, synthetic construct
  source 1..18: mol_type = other DNA
gcctactggagacattgt

SEQ ID NO: 31911 - DNA, 18 bp, synthetic construct
  source 1..18: mol_type = other DNA
tgcctactggagacattg

SEQ ID NO: 31912 - DNA, 18 bp, synthetic construct
  source 1..18: mol_type = other DNA
ctgcctactggagacatt

SEQ ID NO: 31913 - DNA, 18 bp, synthetic construct
  source 1..18: mol_type = other DNA
tctgcctactggagacat

SEQ ID NO: 31914 - DNA, 18 bp, synthetic construct
  source 1..18: mol_type = other DNA
ctctgcctactggagaca

SEQ ID NO: 31915 - DNA, 18 bp, synthetic construct
  source 1..18: mol_type = other DNA
gctctgcctactggagac

SEQ ID NO: 31916 - DNA, 18 bp, synthetic construct
  source 1..18: mol_type = other DNA
ggctctgcctactggaga

SEQ ID NO: 31917 - DNA, 18 bp, synthetic construct
  source 1..18: mol_type = other DNA
aggctctgcctactggag

SEQ ID NO: 31918 - DNA, 18 bp, synthetic construct
  source 1..18: mol_type = other DNA
taggctctgcctactgga

SEQ ID NO: 31919 - DNA, 18 bp, synthetic construct
  source 1..18: mol_type = other DNA
ctaggctctgcctactgg

SEQ ID NO: 31920 - DNA, 18 bp, synthetic construct
  source 1..18: mol_type = other DNA
tctaggctctgcctactg

SEQ ID NO: 31921 - DNA, 18 bp, synthetic construct
  source 1..18: mol_type = other DNA
gtctaggctctgcctact

SEQ ID NO: 31922 - DNA, 18 bp, synthetic construct
  source 1..18: mol_type = other DNA
cctgatcacccaggtgat

SEQ ID NO: 31923 - DNA, 18 bp, synthetic construct
  source 1..18: mol_type = other DNA
ccctgatcacccaggtga

SEQ ID NO: 31924 - DNA, 18 bp, synthetic construct
  source 1..18: mol_type = other DNA
tctgccctgatcacccag

SEQ ID NO: 31925 - DNA, 18 bp, synthetic construct
  source 1..18: mol_type = other DNA
atctctgccctgatcacc

SEQ ID NO: 31926 - DNA, 18 bp, synthetic construct
  source 1..18: mol_type = other DNA
tatctctgccctgatcac

SEQ ID NO: 31927 - DNA, 18 bp, synthetic construct
  source 1..18: mol_type = other DNA
atatctctgccctgatca

SEQ ID NO: 31928 - DNA, 18 bp, synthetic construct
  source 1..18: mol_type = other DNA
catatctctgccctgatc

SEQ ID NO: 31929 - DNA, 18 bp, synthetic construct
  source 1..18: mol_type = other DNA
acatatctctgccctgat

SEQ ID NO: 31930 - DNA, 18 bp, synthetic construct
  source 1..18: mol_type = other DNA
gacatatctctgccctga

SEQ ID NO: 31931 - DNA, 18 bp, synthetic construct
  source 1..18: mol_type = other DNA
tgacatatctctgccctg

SEQ ID NO: 31932 - DNA, 18 bp, synthetic construct
  source 1..18: mol_type = other DNA
gtgacatatctctgccct

SEQ ID NO: 31933 - DNA, 18 bp, synthetic construct
  source 1..18: mol_type = other DNA
tgtgacatatctctgccc

SEQ ID NO: 31934 - DNA, 18 bp, synthetic construct
  source 1..18: mol_type = other DNA
ttgtgacatatctctgcc

SEQ ID NO: 31935 - DNA, 18 bp, synthetic construct
  source 1..18: mol_type = other DNA
gcattgtgacatatctct

SEQ ID NO: 31936 - DNA, 18 bp, synthetic construct
  source 1..18: mol_type = other DNA
ggcattgtgacatatctc

SEQ ID NO: 31937 - DNA, 18 bp, synthetic construct
  source 1..18: mol_type = other DNA
gggcattgtgacatatct

SEQ ID NO: 31938 - DNA, 18 bp, synthetic construct
  source 1..18: mol_type = other DNA
ggggcattgtgacatatc

SEQ ID NO: 31939 - DNA, 18 bp, synthetic construct
  source 1..18: mol_type = other DNA
gggggcattgtgacatat

SEQ ID NO: 31940 - DNA, 18 bp, synthetic construct
  source 1..18: mol_type = other DNA
cagggggcattgtgacat

SEQ ID NO: 31941 - DNA, 18 bp, synthetic construct
  source 1..18: mol_type = other DNA
acagggggcattgtgaca

SEQ ID NO: 31942 - DNA, 18 bp, synthetic construct
  source 1..18: mol_type = other DNA
tacagggggcattgtgac

SEQ ID NO: 31943 - DNA, 18 bp, synthetic construct
  source 1..18: mol_type = other DNA
ttacagggggcattgtga

SEQ ID NO: 31944 - DNA, 18 bp, synthetic construct
  source 1..18: mol_type = other DNA
cttacagggggcattgtg

SEQ ID NO: 31945 - DNA, 18 bp, synthetic construct
  source 1..18: mol_type = other DNA
gcttacagggggcattgt

SEQ ID NO: 31946 - DNA, 18 bp, synthetic construct
  source 1..18: mol_type = other DNA
tgcttacagggggcattg

SEQ ID NO: 31947 - DNA, 18 bp, synthetic construct
  source 1..18: mol_type = other DNA
ctgcttacagggggcatt

SEQ ID NO: 31948 - DNA, 18 bp, synthetic construct
  source 1..18: mol_type = other DNA
tctgcttacagggggcat

SEQ ID NO: 31949 - DNA, 18 bp, synthetic construct
  source 1..18: mol_type = other DNA
atctgcttacagggggca

SEQ ID NO: 31950 - DNA, 18 bp, synthetic construct
  source 1..18: mol_type = other DNA
gatctgcttacagggggc

SEQ ID NO: 31951 - DNA, 18 bp, synthetic construct
  source 1..18: mol_type = other DNA
ggatctgcttacaggggg

SEQ ID NO: 31952 - DNA, 18 bp, synthetic construct
  source 1..18: mol_type = other DNA
gggatctgcttacagggg

SEQ ID NO: 31953 - DNA, 18 bp, synthetic construct
  source 1..18: mol_type = other DNA
tgggatctgcttacaggg

SEQ ID NO: 31954 - DNA, 18 bp, synthetic construct
  source 1..18: mol_type = other DNA
ctgggatctgcttacagg

SEQ ID NO: 31955 - DNA, 18 bp, synthetic construct
  source 1..18: mol_type = other DNA
tctgggatctgcttacag

SEQ ID NO: 31956 - DNA, 18 bp, synthetic construct
  source 1..18: mol_type = other DNA
gtctgggatctgcttaca

SEQ ID NO: 31957 - DNA, 18 bp, synthetic construct
  source 1..18: mol_type = other DNA
tgtctgggatctgcttac

SEQ ID NO: 31958 - DNA, 18 bp, synthetic construct
  source 1..18: mol_type = other DNA
ttgtctgggatctgctta

SEQ ID NO: 31959 - DNA, 18 bp, synthetic construct
  source 1..18: mol_type = other DNA
cttgtctgggatctgctt

SEQ ID NO: 31960 - DNA, 18 bp, synthetic construct
  source 1..18: mol_type = other DNA
tcttgtctgggatctgct

SEQ ID NO: 31961 - DNA, 18 bp, synthetic construct
  source 1..18: mol_type = other DNA
ctcttgtctgggatctgc

SEQ ID NO: 31962 - DNA, 18 bp, synthetic construct
  source 1..18: mol_type = other DNA
actcttgtctgggatctg

SEQ ID NO: 31963 - DNA, 18 bp, synthetic construct
  source 1..18: mol_type = other DNA
aactcttgtctgggatct

SEQ ID NO: 31964 - DNA, 18 bp, synthetic construct
  source 1..18: mol_type = other DNA
caactcttgtctgggatc

SEQ ID NO: 31965 - DNA, 18 bp, synthetic construct
  source 1..18: mol_type = other DNA
gcaactcttgtctgggat

SEQ ID NO: 31966 - DNA, 18 bp, synthetic construct
  source 1..18: mol_type = other DNA
tgcaactcttgtctggga

SEQ ID NO: 31967 - DNA, 18 bp, synthetic construct
  source 1..18: mol_type = other DNA
atgcaactcttgtctggg

SEQ ID NO: 31968 - DNA, 18 bp, synthetic construct
  source 1..18: mol_type = other DNA
gatgcaactcttgtctgg

SEQ ID NO: 31969 - DNA, 18 bp, synthetic construct
  source 1..18: mol_type = other DNA
tgatgcaactcttgtctg

SEQ ID NO: 31970 - DNA, 18 bp, synthetic construct
  source 1..18: mol_type = other DNA
gtgatgcaactcttgtct

SEQ ID NO: 31971 - DNA, 18 bp, synthetic construct
  source 1..18: mol_type = other DNA
ggtgatgcaactcttgtc

SEQ ID NO: 31972 - DNA, 18 bp, synthetic construct
  source 1..18: mol_type = other DNA
aggtgatgcaactcttgt

SEQ ID NO: 31973 - DNA, 18 bp, synthetic construct
  source 1..18: mol_type = other DNA
gaggtgatgcaactcttg

SEQ ID NO: 31974 - DNA, 18 bp, synthetic construct
  source 1..18: mol_type = other DNA
cgaggtgatgcaactctt

SEQ ID NO: 31975 - DNA, 18 bp, synthetic construct
  source 1..18: mol_type = other DNA
ccgaggtgatgcaactct

SEQ ID NO: 31976 - DNA, 18 bp, synthetic construct
  source 1..18: mol_type = other DNA
accgaggtgatgcaactc

SEQ ID NO: 31977 - DNA, 18 bp, synthetic construct
  source 1..18: mol_type = other DNA
caccgaggtgatgcaact

SEQ ID NO: 31978 - DNA, 18 bp, synthetic construct
  source 1..18: mol_type = other DNA
tcaccgaggtgatgcaac

SEQ ID NO: 31979 - DNA, 18 bp, synthetic construct
  source 1..18: mol_type = other DNA
atcaccgaggtgatgcaa

SEQ ID NO: 31980 - DNA, 18 bp, synthetic construct
  source 1..18: mol_type = other DNA
gatcaccgaggtgatgca

SEQ ID NO: 31981 - DNA, 18 bp, synthetic construct
  source 1..18: mol_type = other DNA
tgatcaccgaggtgatgc

SEQ ID NO: 31982 - DNA, 18 bp, synthetic construct
  source 1..18: mol_type = other DNA
ctgatcaccgaggtgatg

SEQ ID NO: 31983 - DNA, 18 bp, synthetic construct
  source 1..18: mol_type = other DNA
actgatcaccgaggtgat

SEQ ID NO: 31984 - DNA, 18 bp, synthetic construct
  source 1..18: mol_type = other DNA
cactgatcaccgaggtga

SEQ ID NO: 31985 - DNA, 18 bp, synthetic construct
  source 1..18: mol_type = other DNA
gcactgatcaccgaggtg

SEQ ID NO: 31986 - DNA, 18 bp, synthetic construct
  source 1..18: mol_type = other DNA
tgcactgatcaccgaggt

SEQ ID NO: 31987 - DNA, 18 bp, synthetic construct
  source 1..18: mol_type = other DNA
ctgcactgatcaccgagg

SEQ ID NO: 31988 - DNA, 18 bp, synthetic construct
  source 1..18: mol_type = other DNA
tctgcactgatcaccgag

SEQ ID NO: 31989 - DNA, 18 bp, synthetic construct
  source 1..18: mol_type = other DNA
ctctgcactgatcaccga

SEQ ID NO: 31990 - DNA, 18 bp, synthetic construct
  source 1..18: mol_type = other DNA
tctctgcactgatcaccg

SEQ ID NO: 31991 - DNA, 18 bp, synthetic construct
  source 1..18: mol_type = other DNA
gtatctctgcactgatca

SEQ ID NO: 31992 - DNA, 18 bp, synthetic construct
  source 1..18: mol_type = other DNA
gacgtatctctgcactga

SEQ ID NO: 31993 - DNA, 18 bp, synthetic construct
  source 1..18: mol_type = other DNA
tgacgtatctctgcactg

SEQ ID NO: 31994 - DNA, 18 bp, synthetic construct
  source 1..18: mol_type = other DNA
gtgacgtatctctgcact

SEQ ID NO: 31995 - DNA, 18 bp, synthetic construct
  source 1..18: mol_type = other DNA
tgtgacgtatctctgcac

SEQ ID NO: 31996 - DNA, 18 bp, synthetic construct
  source 1..18: mol_type = other DNA
cattgtgacgtatctctg

SEQ ID NO: 31997 - DNA, 18 bp, synthetic construct
  source 1..18: mol_type = other DNA
gcattgtgacgtatctct

SEQ ID NO: 31998 - DNA, 18 bp, synthetic construct
  source 1..18: mol_type = other DNA
ggcattgtgacgtatctc

SEQ ID NO: 31999 - DNA, 18 bp, synthetic construct
  source 1..18: mol_type = other DNA
gggcattgtgacgtatct

SEQ ID NO: 32000 - DNA, 18 bp, synthetic construct
  source 1..18: mol_type = other DNA
ggggcattgtgacgtatc

SEQ ID NO: 32001 - DNA, 18 bp, synthetic construct
  source 1..18: mol_type = other DNA
aggggcattgtgacgtat

SEQ ID NO: 32002 - DNA, 18 bp, synthetic construct
  source 1..18: mol_type = other DNA
caggggcattgtgacgta

SEQ ID NO: 32003 - DNA, 18 bp, synthetic construct
  source 1..18: mol_type = other DNA
acaggggcattgtgacgt

SEQ ID NO: 32004 - DNA, 18 bp, synthetic construct
  source 1..18: mol_type = other DNA
tacaggggcattgtgacg

SEQ ID NO: 32005 - DNA, 18 bp, synthetic construct
  source 1..18: mol_type = other DNA
gttatgtaactcttgtct

SEQ ID NO: 32006 - DNA, 18 bp, synthetic construct
  source 1..18: mol_type = other DNA
ggttatgtaactcttgtc

SEQ ID NO: 32007 - DNA, 18 bp, synthetic construct
  source 1..18: mol_type = other DNA
gggttatgtaactcttgt

SEQ ID NO: 32008 - DNA, 18 bp, synthetic construct
  source 1..18: mol_type = other DNA
tgggttatgtaactcttg

SEQ ID NO: 32009 - DNA, 18 bp, synthetic construct
  source 1..18: mol_type = other DNA
ctgggttatgtaactctt

SEQ ID NO: 32010 - DNA, 18 bp, synthetic construct
  source 1..18: mol_type = other DNA
cctgggttatgtaactct

SEQ ID NO: 32011 - DNA, 18 bp, synthetic construct
  source 1..18: mol_type = other DNA
acctgggttatgtaactc

SEQ ID NO: 32012 - DNA, 18 bp, synthetic construct
  source 1..18: mol_type = other DNA
cacctgggttatgtaact

SEQ ID NO: 32013 - DNA, 18 bp, synthetic construct
  source 1..18: mol_type = other DNA
tcacctgggttatgtaac

SEQ ID NO: 32014 - DNA, 18 bp, synthetic construct
  source 1..18: mol_type = other DNA
atcacctgggttatgtaa

SEQ ID NO: 32015 - DNA, 18 bp, synthetic construct
  source 1..18: mol_type = other DNA
gatcacctgggttatgta

SEQ ID NO: 32016 - DNA, 18 bp, synthetic construct
  source 1..18: mol_type = other DNA
ggatcacctgggttatgt

SEQ ID NO: 32017 - DNA, 18 bp, synthetic construct
  source 1..18: mol_type = other DNA
cggatcacctgggttatg

SEQ ID NO: 32018 - DNA, 18 bp, synthetic construct
  source 1..18: mol_type = other DNA
acggatcacctgggttat

SEQ ID NO: 32019 - DNA, 18 bp, synthetic construct
  source 1..18: mol_type = other DNA
tacggatcacctgggtta

SEQ ID NO: 32020 - DNA, 18 bp, synthetic construct
  source 1..18: mol_type = other DNA
gtacggatcacctgggtt

SEQ ID NO: 32021 - DNA, 18 bp, synthetic construct
  source 1..18: mol_type = other DNA
tgtacggatcacctgggt

SEQ ID NO: 32022 - DNA, 18 bp, synthetic construct
  source 1..18: mol_type = other DNA
ctgtacggatcacctggg

SEQ ID NO: 32023 - DNA, 18 bp, synthetic construct
  source 1..18: mol_type = other DNA
tctgtacggatcacctgg

SEQ ID NO: 32024 - DNA, 18 bp, synthetic construct
  source 1..18: mol_type = other DNA
ctctgtacggatcacctg

SEQ ID NO: 32025 - DNA, 18 bp, synthetic construct
  source 1..18: mol_type = other DNA
actctgtacggatcacct

SEQ ID NO: 32026 - DNA, 18 bp, synthetic construct
  source 1..18: mol_type = other DNA
cactctgtacggatcacc

SEQ ID NO: 32027 - DNA, 18 bp, synthetic construct
  source 1..18: mol_type = other DNA
tcactctgtacggatcac

SEQ ID NO: 32028 - DNA, 18 bp, synthetic construct
  source 1..18: mol_type = other DNA
atcactctgtacggatca

SEQ ID NO: 32029 - DNA, 18 bp, synthetic construct
  source 1..18: mol_type = other DNA
catcactctgtacggatc

SEQ ID NO: 32030 - DNA, 18 bp, synthetic construct
  source 1..18: mol_type = other DNA
acatcactctgtacggat

SEQ ID NO: 32031 - DNA, 18 bp, synthetic construct
  source 1..18: mol_type = other DNA
gacatcactctgtacgga

SEQ ID NO: 32032 - DNA, 18 bp, synthetic construct
  source 1..18: mol_type = other DNA
tgacatcactctgtacgg

SEQ ID NO: 32033 - DNA, 18 bp, synthetic construct
  source 1..18: mol_type = other DNA
gtgacatcactctgtacg

SEQ ID NO: 32034 - DNA, 18 bp, synthetic construct
  source 1..18: mol_type = other DNA
tgtgacatcactctgtac

SEQ ID NO: 32035 - DNA, 18 bp, synthetic construct
  source 1..18: mol_type = other DNA
ttgtgacatcactctgta

SEQ ID NO: 32036 - DNA, 18 bp, synthetic construct
  source 1..18: mol_type = other DNA
gttgtgacatcactctgt

SEQ ID NO: 32037 - DNA, 18 bp, synthetic construct
  source 1..18: mol_type = other DNA
cgttgtgacatcactctg

SEQ ID NO: 32038 - DNA, 18 bp, synthetic construct
  source 1..18: mol_type = other DNA
gcgttgtgacatcactct

SEQ ID NO: 32039 - DNA, 18 bp, synthetic construct
  source 1..18: mol_type = other DNA
ggcgttgtgacatcactc

SEQ ID NO: 32040 - DNA, 18 bp, synthetic construct
  source 1..18: mol_type = other DNA
gggcgttgtgacatcact

SEQ ID NO: 32041 - DNA, 18 bp, synthetic construct
  source 1..18: mol_type = other DNA
agggcgttgtgacatcac

SEQ ID NO: 32042 - DNA, 18 bp, synthetic construct
  source 1..18: mol_type = other DNA
gagggcgttgtgacatca

SEQ ID NO: 32043 - DNA, 18 bp, synthetic construct
  source 1..18: mol_type = other DNA
agagggcgttgtgacatc

SEQ ID NO: 32044 - DNA, 18 bp, synthetic construct
  source 1..18: mol_type = other DNA
cagagggcgttgtgacat

SEQ ID NO: 32045 - DNA, 18 bp, synthetic construct
  source 1..18: mol_type = other DNA
acagagggcgttgtgaca

SEQ ID NO: 32046 - DNA, 18 bp, synthetic construct
  source 1..18: mol_type = other DNA
tacagagggcgttgtgac

SEQ ID NO: 32047 - DNA, 18 bp, synthetic construct
  source 1..18: mol_type = other DNA
ctacagagggcgttgtga

SEQ ID NO: 32048 - DNA, 18 bp, synthetic construct
  source 1..18: mol_type = other DNA
cctacagagggcgttgtg

SEQ ID NO: 32049 - DNA, 18 bp, synthetic construct
  source 1..18: mol_type = other DNA
gcctacagagggcgttgt

SEQ ID NO: 32050 - DNA, 18 bp, synthetic construct
  source 1..18: mol_type = other DNA
tgcctacagagggcgttg

SEQ ID NO: 32051 - DNA, 18 bp, synthetic construct
  source 1..18: mol_type = other DNA
ctgcctacagagggcgtt

SEQ ID NO: 32052 - DNA, 18 bp, synthetic construct
  source 1..18: mol_type = other DNA
tctgcctacagagggcgt

SEQ ID NO: 32053 - DNA, 18 bp, synthetic construct
  source 1..18: mol_type = other DNA
ctctgcctacagagggcg

SEQ ID NO: 32054 - DNA, 18 bp, synthetic construct
  source 1..18: mol_type = other DNA
tctctgcctacagagggc

SEQ ID NO: 32055 - DNA, 18 bp, synthetic construct
  source 1..18: mol_type = other DNA
gtctctgcctacagaggg

SEQ ID NO: 32056 - DNA, 18 bp, synthetic construct
  source 1..18: mol_type = other DNA
agtctctgcctacagagg

SEQ ID NO: 32057 - DNA, 18 bp, synthetic construct
  source 1..18: mol_type = other DNA
tagtctctgcctacagag

SEQ ID NO: 32058 - DNA, 18 bp, synthetic construct
  source 1..18: mol_type = other DNA
ctagtctctgcctacaga

SEQ ID NO: 32059 - DNA, 18 bp, synthetic construct
  source 1..18: mol_type = other DNA
tctagtctctgcctacag

SEQ ID NO: 32060 - DNA, 18 bp, synthetic construct
  source 1..18: mol_type = other DNA
ttctagtctctgcctaca

SEQ ID NO: 32061 - DNA, 18 bp, synthetic construct
  source 1..18: mol_type = other DNA
tttctagtctctgcctac

SEQ ID NO: 32062 - DNA, 18 bp, synthetic construct
  source 1..18: mol_type = other DNA
ttttctagtctctgccta

SEQ ID NO: 32063 - DNA, 18 bp, synthetic construct
  source 1..18: mol_type = other DNA
cttttctagtctctgcct

SEQ ID NO: 32064 - DNA, 18 bp, synthetic construct
  source 1..18: mol_type = other DNA
tcttttctagtctctgcc

SEQ ID NO: 32065 - DNA, 18 bp, synthetic construct
  source 1..18: mol_type = other DNA
ctcttttctagtctctgc

SEQ ID NO: 32066 - DNA, 18 bp, synthetic construct
  source 1..18: mol_type = other DNA
actcttttctagtctctg

SEQ ID NO: 32067 - DNA, 18 bp, synthetic construct
  source 1..18: mol_type = other DNA
aactcttttctagtctct

SEQ ID NO: 32068 - DNA, 18 bp, synthetic construct
  source 1..18: mol_type = other DNA
taactcttttctagtctc

SEQ ID NO: 32069 - DNA, 18 bp, synthetic construct
  source 1..18: mol_type = other DNA
gtaactcttttctagtct

SEQ ID NO: 32070 - DNA, 18 bp, synthetic construct
  source 1..18: mol_type = other DNA
tgtaactcttttctagtc

SEQ ID NO: 32071 - DNA, 18 bp, synthetic construct
  source 1..18: mol_type = other DNA
ccaggtaatgtaactctt

SEQ ID NO: 32072 - DNA, 18 bp, synthetic construct
  source 1..18: mol_type = other DNA
cccaggtaatgtaactct

SEQ ID NO: 32073 - DNA, 18 bp, synthetic construct
  source 1..18: mol_type = other DNA
acccaggtaatgtaactc

SEQ ID NO: 32074 - DNA, 18 bp, synthetic construct
  source 1..18: mol_type = other DNA
cacccaggtaatgtaact

SEQ ID NO: 32075 - DNA, 18 bp, synthetic construct
  source 1..18: mol_type = other DNA
tcacccaggtaatgtaac

SEQ ID NO: 32076 - DNA, 18 bp, synthetic construct
  source 1..18: mol_type = other DNA
atcacccaggtaatgtaa

SEQ ID NO: 32077 - DNA, 18 bp, synthetic construct
  source 1..18: mol_type = other DNA
gatcacccaggtaatgta

SEQ ID NO: 32078 - DNA, 18 bp, synthetic construct
  source 1..18: mol_type = other DNA
tgatcacccaggtaatgt

SEQ ID NO: 32079 - DNA, 18 bp, synthetic construct
  source 1..18: mol_type = other DNA
ctgatcacccaggtaatg

SEQ ID NO: 32080 - DNA, 18 bp, synthetic construct
  source 1..18: mol_type = other DNA
actgatcacccaggtaat

SEQ ID NO: 32081 - DNA, 18 bp, synthetic construct
  source 1..18: mol_type = other DNA
cactgatcacccaggtaa

SEQ ID NO: 32082 - DNA, 18 bp, synthetic construct
  source 1..18: mol_type = other DNA
gcactgatcacccaggta

SEQ ID NO: 32083 - DNA, 18 bp, synthetic construct
  source 1..18: mol_type = other DNA
ctacagggggcattgtga

SEQ ID NO: 32084 - DNA, 18 bp, synthetic construct
  source 1..18: mol_type = other DNA
cctacagggggcattgtg

SEQ ID NO: 32085 - DNA, 18 bp, synthetic construct
  source 1..18: mol_type = other DNA
gcctacagggggcattgt

SEQ ID NO: 32086 - DNA, 18 bp, synthetic construct
  source 1..18: mol_type = other DNA
tgcctacagggggcattg

SEQ ID NO: 32087 - DNA, 18 bp, synthetic construct
  source 1..18: mol_type = other DNA
ctgcctacagggggcatt

SEQ ID NO: 32088 - DNA, 18 bp, synthetic construct
  source 1..18: mol_type = other DNA
tctgcctacagggggcat

SEQ ID NO: 32089 - DNA, 18 bp, synthetic construct
  source 1..18: mol_type = other DNA
atgctctgcctacagggg

SEQ ID NO: 32090 - DNA, 18 bp, synthetic construct
  source 1..18: mol_type = other DNA
tatgctctgcctacaggg

SEQ ID NO: 32091 - DNA, 18 bp, synthetic construct
  source 1..18: mol_type = other DNA
ctatgctctgcctacagg

SEQ ID NO: 32092 - DNA, 18 bp, synthetic construct
  source 1..18: mol_type = other DNA
tctatgctctgcctacag

SEQ ID NO: 32093 - DNA, 18 bp, synthetic construct
  source 1..18: mol_type = other DNA
ctctatgctctgcctaca

SEQ ID NO: 32094 - DNA, 18 bp, synthetic construct
  source 1..18: mol_type = other DNA
tctctatgctctgcctac

SEQ ID NO: 32095 - DNA, 18 bp, synthetic construct
  source 1..18: mol_type = other DNA
ttctctatgctctgccta

SEQ ID NO: 32096 - DNA, 18 bp, synthetic construct
  source 1..18: mol_type = other DNA
cttctctatgctctgcct

SEQ ID NO: 32097 - DNA, 18 bp, synthetic construct
  source 1..18: mol_type = other DNA
tcttctctatgctctgcc

SEQ ID NO: 32098 - DNA, 18 bp, synthetic construct
  source 1..18: mol_type = other DNA
ctcttctctatgctctgc

SEQ ID NO: 32099 - DNA, 18 bp, synthetic construct
  source 1..18: mol_type = other DNA
actcttctctatgctctg

SEQ ID NO: 32100 - DNA, 18 bp, synthetic construct
  source 1..18: mol_type = other DNA
aactcttctctatgctct

SEQ ID NO: 32101 - DNA, 18 bp, synthetic construct
  source 1..18: mol_type = other DNA
caactcttctctatgctc

SEQ ID NO: 32102 - DNA, 18 bp, synthetic construct
  source 1..18: mol_type = other DNA
gcaactcttctctatgct

SEQ ID NO: 32103 - DNA, 18 bp, synthetic construct
  source 1..18: mol_type = other DNA
tgcaactcttctctatgc

SEQ ID NO: 32104 - DNA, 18 bp, synthetic construct
  source 1..18: mol_type = other DNA
atgcaactcttctctatg

SEQ ID NO: 32105 - DNA, 18 bp, synthetic construct
  source 1..18: mol_type = other DNA
gatgcaactcttctctat

SEQ ID NO: 32106 - DNA, 18 bp, synthetic construct
  source 1..18: mol_type = other DNA
tgatgcaactcttctcta

SEQ ID NO: 32107 - DNA, 18 bp, synthetic construct
  source 1..18: mol_type = other DNA
gtgatgcaactcttctct

SEQ ID NO: 32108 - DNA, 18 bp, synthetic construct
  source 1..18: mol_type = other DNA
ggtgatgcaactcttctc

SEQ ID NO: 32109 - DNA, 18 bp, synthetic construct
  source 1..18: mol_type = other DNA
aggtgatgcaactcttct

SEQ ID NO: 32110 - DNA, 18 bp, synthetic construct
  source 1..18: mol_type = other DNA
caggtgatgcaactcttc

SEQ ID NO: 32111 - DNA, 18 bp, synthetic construct
  source 1..18: mol_type = other DNA
ccaggtgatgcaactctt

SEQ ID NO: 32112 - DNA, 18 bp, synthetic construct
  source 1..18: mol_type = other DNA
cccaggtgatgcaactct

SEQ ID NO: 32113 - DNA, 18 bp, synthetic construct
  source 1..18: mol_type = other DNA
acccaggtgatgcaactc

SEQ ID NO: 32114 - DNA, 18 bp, synthetic construct
  source 1..18: mol_type = other DNA
cacccaggtgatgcaact

SEQ ID NO: 32115 - DNA, 18 bp, synthetic construct
  source 1..18: mol_type = other DNA
tcacccaggtgatgcaac

SEQ ID NO: 32116 - DNA, 18 bp, synthetic construct
  source 1..18: mol_type = other DNA
atcacccaggtgatgcaa

SEQ ID NO: 32117 - DNA, 18 bp, synthetic construct
  source 1..18: mol_type = other DNA
gatcacccaggtgatgca

SEQ ID NO: 32118 - DNA, 18 bp, synthetic construct
  source 1..18: mol_type = other DNA
tgatcacccaggtgatgc

SEQ ID NO: 32119 - DNA, 18 bp, synthetic construct
  source 1..18: mol_type = other DNA
tacactgatcacccaggt

SEQ ID NO: 32120 - DNA, 18 bp, synthetic construct
  source 1..18: mol_type = other DNA
ctacactgatcacccagg

SEQ ID NO: 32121 - DNA, 18 bp, synthetic construct
  source 1..18: mol_type = other DNA
tctacactgatcacccag

SEQ ID NO: 32122 - DNA, 18 bp, synthetic construct
  source 1..18: mol_type = other DNA
ctctacactgatcaccca

SEQ ID NO: 32123 - DNA, 18 bp, synthetic construct
  source 1..18: mol_type = other DNA
tctctacactgatcaccc

SEQ ID NO: 32124 - DNA, 18 bp, synthetic construct
  source 1..18: mol_type = other DNA
gacatatctctacactga

SEQ ID NO: 32125 - DNA, 18 bp, synthetic construct
  source 1..18: mol_type = other DNA
gtgacatatctctacact

SEQ ID NO: 32126 - DNA, 18 bp, synthetic construct
  source 1..18: mol_type = other DNA
tgtgacatatctctacac

SEQ ID NO: 32127 - DNA, 18 bp, synthetic construct
  source 1..18: mol_type = other DNA
ttgtgacatatctctaca

SEQ ID NO: 32128 - DNA, 18 bp, synthetic construct
  source 1..18: mol_type = other DNA
ggggacattgtgacatat

SEQ ID NO: 32129 - DNA, 18 bp, synthetic construct
  source 1..18: mol_type = other DNA
aggggacattgtgacata

SEQ ID NO: 32130 - DNA, 18 bp, synthetic construct
  source 1..18: mol_type = other DNA
taggatctgcctacaggg

SEQ ID NO: 32131 - DNA, 18 bp, synthetic construct
  source 1..18: mol_type = other DNA
ctaggatctgcctacagg

SEQ ID NO: 32132 - DNA, 18 bp, synthetic construct
  source 1..18: mol_type = other DNA
tctaggatctgcctacag

SEQ ID NO: 32133 - DNA, 18 bp, synthetic construct
  source 1..18: mol_type = other DNA
gtctaggatctgcctaca

SEQ ID NO: 32134 - DNA, 18 bp, synthetic construct
  source 1..18: mol_type = other DNA
tgtctaggatctgcctac

SEQ ID NO: 32135 - DNA, 18 bp, synthetic construct
  source 1..18: mol_type = other DNA
ttgtctaggatctgccta

SEQ ID NO: 32136 - DNA, 18 bp, synthetic construct
  source 1..18: mol_type = other DNA
cttgtctaggatctgcct

SEQ ID NO: 32137 - DNA, 18 bp, synthetic construct
  source 1..18: mol_type = other DNA
tcttgtctaggatctgcc

SEQ ID NO: 32138 - DNA, 18 bp, synthetic construct
  source 1..18: mol_type = other DNA
ctcttgtctaggatctgc

SEQ ID NO: 32139 - DNA, 18 bp, synthetic construct
  source 1..18: mol_type = other DNA
actcttgtctaggatctg

SEQ ID NO: 32140 - DNA, 18 bp, synthetic construct
  source 1..18: mol_type = other DNA
aactcttgtctaggatct

SEQ ID NO: 32141 - DNA, 18 bp, synthetic construct
  source 1..18: mol_type = other DNA
gcactgatcacctaagtg

SEQ ID NO: 32142 - DNA, 18 bp, synthetic construct
  source 1..18: mol_type = other DNA
tgcactgatcacctaagt

SEQ ID NO: 32143 - DNA, 18 bp, synthetic construct
  source 1..18: mol_type = other DNA
ctgcactgatcacctaag

SEQ ID NO: 32144 - DNA, 18 bp, synthetic construct
  source 1..18: mol_type = other DNA
tctgcactgatcacctaa

SEQ ID NO: 32145 - DNA, 18 bp, synthetic construct
  source 1..18: mol_type = other DNA
ctctgcactgatcaccta

SEQ ID NO: 32146 - DNA, 18 bp, synthetic construct
  source 1..18: mol_type = other DNA
tctctgcactgatcacct

SEQ ID NO: 32147 - DNA, 18 bp, synthetic construct
  source 1..18: mol_type = other DNA
atctctgcactgatcact

SEQ ID NO: 32148 - DNA, 18 bp, synthetic construct
  source 1..18: mol_type = other DNA
tctaggctttggcctaca

SEQ ID NO: 32149 - DNA, 18 bp, synthetic construct
  source 1..18: mol_type = other DNA
gtctaggctttggcctac

SEQ ID NO: 32150 - DNA, 18 bp, synthetic construct
  source 1..18: mol_type = other DNA
tgtctaggctttggccta

SEQ ID NO: 32151 - DNA, 18 bp, synthetic construct
  source 1..18: mol_type = other DNA
ttgtctaggctttggcct

SEQ ID NO: 32152 - DNA, 18 bp, synthetic construct
  source 1..18: mol_type = other DNA
attgtctaggctttggcc

SEQ ID NO: 32153 - DNA, 18 bp, synthetic construct
  source 1..18: mol_type = other DNA
tattgtctaggctttggc

SEQ ID NO: 32154 - DNA, 18 bp, synthetic construct
  source 1..18: mol_type = other DNA
ctattgtctaggctttgg

SEQ ID NO: 32155 - DNA, 18 bp, synthetic construct
  source 1..18: mol_type = other DNA
actattgtctaggctttg

SEQ ID NO: 32156 - DNA, 18 bp, synthetic construct
  source 1..18: mol_type = other DNA
aactattgtctaggcttt

SEQ ID NO: 32157 - DNA, 18 bp, synthetic construct
  source 1..18: mol_type = other DNA
taactattgtctaggctt

SEQ ID NO: 32158 - DNA, 18 bp, synthetic construct
  source 1..18: mol_type = other DNA
gtaactattgtctaggct

SEQ ID NO: 32159 - DNA, 18 bp, synthetic construct
  source 1..18: mol_type = other DNA
tgtaactattgtctaggc

SEQ ID NO: 32160 - DNA, 18 bp, synthetic construct
  source 1..18: mol_type = other DNA
cccaagtgatgtaactat

SEQ ID NO: 32161 - DNA, 18 bp, synthetic construct
  source 1..18: mol_type = other DNA
acccaagtgatgtaacta

SEQ ID NO: 32162 - DNA, 18 bp, synthetic construct
  source 1..18: mol_type = other DNA
cacccaagtgatgtaact

SEQ ID NO: 32163 - DNA, 18 bp, synthetic construct
  source 1..18: mol_type = other DNA
tcacccaagtgatgtaac

SEQ ID NO: 32164 - DNA, 18 bp, synthetic construct
  source 1..18: mol_type = other DNA
atcacccaagtgatgtaa

SEQ ID NO: 32165 - DNA, 18 bp, synthetic construct
  source 1..18: mol_type = other DNA
gatcacccaagtgatgta

SEQ ID NO: 32166 - DNA, 18 bp, synthetic construct
  source 1..18: mol_type = other DNA
tgatcacccaagtgatgt

SEQ ID NO: 32167 - DNA, 18 bp, synthetic construct
  source 1..18: mol_type = other DNA
ctgatcacccaagtgatg

SEQ ID NO: 32168 - DNA, 18 bp, synthetic construct
  source 1..18: mol_type = other DNA
actgatcacccaagtgat

SEQ ID NO: 32169 - DNA, 18 bp, synthetic construct
  source 1..18: mol_type = other DNA
cactgatcacccaagtga

SEQ ID NO: 32170 - DNA, 18 bp, synthetic construct
  source 1..18: mol_type = other DNA
ccactgatcacccaagtg

SEQ ID NO: 32171 - DNA, 18 bp, synthetic construct
  source 1..18: mol_type = other DNA
gccactgatcacccaagt

SEQ ID NO: 32172 - DNA, 18 bp, synthetic construct
  source 1..18: mol_type = other DNA
cgccactgatcacccaag

SEQ ID NO: 32173 - DNA, 18 bp, synthetic construct
  source 1..18: mol_type = other DNA
tcgccactgatcacccaa

SEQ ID NO: 32174 - DNA, 18 bp, synthetic construct
  source 1..18: mol_type = other DNA
ctcgccactgatcaccca

SEQ ID NO: 32175 - DNA, 18 bp, synthetic construct
  source 1..18: mol_type = other DNA
tctcgccactgatcaccc

SEQ ID NO: 32176 - DNA, 18 bp, synthetic construct
  source 1..18: mol_type = other DNA
atctcgccactgatcacc

SEQ ID NO: 32177 - DNA, 18 bp, synthetic construct
  source 1..18: mol_type = other DNA
gatctcgccactgatcac

SEQ ID NO: 32178 - DNA, 18 bp, synthetic construct
  source 1..18: mol_type = other DNA
agatctcgccactgatca

SEQ ID NO: 32179 - DNA, 18 bp, synthetic construct
  source 1..18: mol_type = other DNA
gagatctcgccactgatc

SEQ ID NO: 32180 - DNA, 18 bp, synthetic construct
  source 1..18: mol_type = other DNA
agagatctcgccactgat

SEQ ID NO: 32181 - DNA, 18 bp, synthetic construct
  source 1..18: mol_type = other DNA
gagagatctcgccactga

SEQ ID NO: 32182 - DNA, 18 bp, synthetic construct
  source 1..18: mol_type = other DNA
tgagagatctcgccactg

SEQ ID NO: 32183 - DNA, 18 bp, synthetic construct
  source 1..18: mol_type = other DNA
gtgagagatctcgccact

SEQ ID NO: 32184 - DNA, 18 bp, synthetic construct
  source 1..18: mol_type = other DNA
tgtgagagatctcgccac

SEQ ID NO: 32185 - DNA, 18 bp, synthetic construct
  source 1..18: mol_type = other DNA
ttgtgagagatctcgcca

SEQ ID NO: 32186 - DNA, 18 bp, synthetic construct
  source 1..18: mol_type = other DNA
attgtgagagatctcgcc

SEQ ID NO: 32187 - DNA, 18 bp, synthetic construct
  source 1..18: mol_type = other DNA
aattgtgagagatctcgc

SEQ ID NO: 32188 - DNA, 18 bp, synthetic construct
  source 1..18: mol_type = other DNA
ggaattgtgagagatctc

SEQ ID NO: 32189 - DNA, 18 bp, synthetic construct
  source 1..18: mol_type = other DNA
gggaattgtgagagatct

SEQ ID NO: 32190 - DNA, 18 bp, synthetic construct
  source 1..18: mol_type = other DNA
ggggaattgtgagagatc

SEQ ID NO: 32191 - DNA, 18 bp, synthetic construct
  source 1..18: mol_type = other DNA
aggggaattgtgagagat

SEQ ID NO: 32192 - DNA, 18 bp, synthetic construct
  source 1..18: mol_type = other DNA
caggggaattgtgagaga

SEQ ID NO: 32193 - DNA, 18 bp, synthetic construct
  source 1..18: mol_type = other DNA
acaggggaattgtgagag

SEQ ID NO: 32194 - DNA, 18 bp, synthetic construct
  source 1..18: mol_type = other DNA
tacaggggaattgtgaga

SEQ ID NO: 32195 - DNA, 18 bp, synthetic construct
  source 1..18: mol_type = other DNA
ctacaggggaattgtgag

SEQ ID NO: 32196 - DNA, 18 bp, synthetic construct
  source 1..18: mol_type = other DNA
cctacaggggaattgtga

SEQ ID NO: 32197 - DNA, 18 bp, synthetic construct
  source 1..18: mol_type = other DNA
gcctacaggggaattgtg

SEQ ID NO: 32198 - DNA, 18 bp, synthetic construct
  source 1..18: mol_type = other DNA
tgcctacaggggaattgt

SEQ ID NO: 32199 - DNA, 18 bp, synthetic construct
  source 1..18: mol_type = other DNA
ctgcctacaggggaattg

SEQ ID NO: 32200 - DNA, 18 bp, synthetic construct
  source 1..18: mol_type = other DNA
tctgcctacaggggaatt

SEQ ID NO: 32201 - DNA, 18 bp, synthetic construct
  source 1..18: mol_type = other DNA
ctctgcctacaggggaat

SEQ ID NO: 32202 - DNA, 18 bp, synthetic construct
  source 1..18: mol_type = other DNA
gctctgcctacaggggaa

SEQ ID NO: 32203 - DNA, 18 bp, synthetic construct
  source 1..18: mol_type = other DNA
agctctgcctacagggga

SEQ ID NO: 32204 - DNA, 18 bp, synthetic construct
  source 1..18: mol_type = other DNA
ataagctctgcctacagg

SEQ ID NO: 32205 - DNA, 18 bp, synthetic construct
  source 1..18: mol_type = other DNA
tataagctctgcctacag

SEQ ID NO: 32206 - DNA, 18 bp, synthetic construct
  source 1..18: mol_type = other DNA
gtataagctctgcctaca

SEQ ID NO: 32207 - DNA, 18 bp, synthetic construct
  source 1..18: mol_type = other DNA
tgtataagctctgcctac

SEQ ID NO: 32208 - DNA, 18 bp, synthetic construct
  source 1..18: mol_type = other DNA
ttgtataagctctgccta

SEQ ID NO: 32209 - DNA, 18 bp, synthetic construct
  source 1..18: mol_type = other DNA
gttgtataagctctgcct

SEQ ID NO: 32210 - DNA, 18 bp, synthetic construct
  source 1..18: mol_type = other DNA
tgttgtataagctctgcc

SEQ ID NO: 32211 - DNA, 18 bp, synthetic construct
  source 1..18: mol_type = other DNA
ctgttgtataagctctgc

SEQ ID NO: 32212 - DNA, 18 bp, synthetic construct
  source 1..18: mol_type = other DNA
actgttgtataagctctg

SEQ ID NO: 32213 - DNA, 18 bp, synthetic construct
  source 1..18: mol_type = other DNA
aactgttgtataagctct

SEQ ID NO: 32214 - DNA, 18 bp, synthetic construct
  source 1..18: mol_type = other DNA
tgggggcattgtgacata

SEQ ID NO: 32215 - DNA, 18 bp, synthetic construct
  source 1..18: mol_type = other DNA
atgggggcattgtgacat

SEQ ID NO: 32216 - DNA, 18 bp, synthetic construct
  source 1..18: mol_type = other DNA
tatgggggcattgtgaca

SEQ ID NO: 32217 - DNA, 18 bp, synthetic construct
  source 1..18: mol_type = other DNA
ctatgggggcattgtgac

SEQ ID NO: 32218 - DNA, 18 bp, synthetic construct
  source 1..18: mol_type = other DNA
cctatgggggcattgtga

SEQ ID NO: 32219 - DNA, 18 bp, synthetic construct
  source 1..18: mol_type = other DNA
gcctatgggggcattgtg

SEQ ID NO: 32220 - DNA, 18 bp, synthetic construct
  source 1..18: mol_type = other DNA
tgcctatgggggcattgt

SEQ ID NO: 32221 - DNA, 18 bp, synthetic construct
  source 1..18: mol_type = other DNA
ctgcctatgggggcattg

SEQ ID NO: 32222 - DNA, 18 bp, synthetic construct
  source 1..18: mol_type = other DNA
tctgcctatgggggcatt

SEQ ID NO: 32223 - DNA, 18 bp, synthetic construct
  source 1..18: mol_type = other DNA
gtatttctgcactgatca

SEQ ID NO: 32224 - DNA, 18 bp, synthetic construct
  source 1..18: mol_type = other DNA
cgtatttctgcactgatc

SEQ ID NO: 32225 - DNA, 18 bp, synthetic construct
  source 1..18: mol_type = other DNA
acgtatttctgcactgat

SEQ ID NO: 32226 - DNA, 18 bp, synthetic construct
  source 1..18: mol_type = other DNA
gacgtatttctgcactga

SEQ ID NO: 32227 - DNA, 18 bp, synthetic construct
  source 1..18: mol_type = other DNA
tgacgtatttctgcactg

SEQ ID NO: 32228 - DNA, 18 bp, synthetic construct
  source 1..18: mol_type = other DNA
gtgacgtatttctgcact

SEQ ID NO: 32229 - DNA, 18 bp, synthetic construct
  source 1..18: mol_type = other DNA
tgtgacgtatttctgcac

SEQ ID NO: 32230 - DNA, 18 bp, synthetic construct
  source 1..18: mol_type = other DNA
ttgtgacgtatttctgca

SEQ ID NO: 32231 - DNA, 18 bp, synthetic construct
  source 1..18: mol_type = other DNA
attgtgacgtatttctgc

SEQ ID NO: 32232 - DNA, 18 bp, synthetic construct
  source 1..18: mol_type = other DNA
cattgtgacgtatttctg

SEQ ID NO: 32233 - DNA, 18 bp, synthetic construct
  source 1..18: mol_type = other DNA
gcattgtgacgtatttct

SEQ ID NO: 32234 - DNA, 18 bp, synthetic construct
  source 1..18: mol_type = other DNA
ggcattgtgacgtatttc

SEQ ID NO: 32235 - DNA, 18 bp, synthetic construct
  source 1..18: mol_type = other DNA
gggcattgtgacgtattt

SEQ ID NO: 32236 - DNA, 18 bp, synthetic construct
  source 1..18: mol_type = other DNA
ggggcattgtgacgtatt

SEQ ID NO: 32237 - DNA, 18 bp, synthetic construct
  source 1..18: mol_type = other DNA
gggggcattgtgacgtat

SEQ ID NO: 32238 - DNA, 18 bp, synthetic construct
  source 1..18: mol_type = other DNA
agggggcattgtgacgta

SEQ ID NO: 32239 - DNA, 18 bp, synthetic construct
  source 1..18: mol_type = other DNA
aagggggcattgtgacgt

SEQ ID NO: 32240 - DNA, 18 bp, synthetic construct
  source 1..18: mol_type = other DNA
taagggggcattgtgacg

SEQ ID NO: 32241 - DNA, 18 bp, synthetic construct
  source 1..18: mol_type = other DNA
ctaagggggcattgtgac

SEQ ID NO: 32242 - DNA, 18 bp, synthetic construct
  source 1..18: mol_type = other DNA
cctaagggggcattgtga

SEQ ID NO: 32243 - DNA, 18 bp, synthetic construct
  source 1..18: mol_type = other DNA
gcctaagggggcattgtg

SEQ ID NO: 32244 - DNA, 18 bp, synthetic construct
  source 1..18: mol_type = other DNA
tgcctaagggggcattgt

SEQ ID NO: 32245 - DNA, 18 bp, synthetic construct
  source 1..18: mol_type = other DNA
ctgcctaagggggcattg

SEQ ID NO: 32246 - DNA, 18 bp, synthetic construct
  source 1..18: mol_type = other DNA
tctgcctaagggggcatt

SEQ ID NO: 32247 - DNA, 18 bp, synthetic construct
  source 1..18: mol_type = other DNA
ctctgcctaagggggcat

SEQ ID NO: 32248 - DNA, 18 bp, synthetic construct
  source 1..18: mol_type = other DNA
aggctctgcctaaggggg

SEQ ID NO: 32249 - DNA, 18 bp, synthetic construct
  source 1..18: mol_type = other DNA
taggctctgcctaagggg

SEQ ID NO: 32250 - DNA, 18 bp, synthetic construct
  source 1..18: mol_type = other DNA
ctaggctctgcctaaggg

SEQ ID NO: 32251 - DNA, 18 bp, synthetic construct
  source 1..18: mol_type = other DNA
tctaggctctgcctaagg

SEQ ID NO: 32252 - DNA, 18 bp, synthetic construct
  source 1..18: mol_type = other DNA
gtctaggctctgcctaag

SEQ ID NO: 32253 - DNA, 18 bp, synthetic construct
  source 1..18: mol_type = other DNA
tgtctaggctctgcctaa

SEQ ID NO: 32254 - DNA, 18 bp, synthetic construct
  source 1..18: mol_type = other DNA
tttgtctaggctctgcct

SEQ ID NO: 32255 - DNA, 18 bp, synthetic construct
  source 1..18: mol_type = other DNA
ttttgtctaggctctgcc

SEQ ID NO: 32256 - DNA, 18 bp, synthetic construct
  source 1..18: mol_type = other DNA
cttttgtctaggctctgc

SEQ ID NO: 32257 - DNA, 18 bp, synthetic construct
  source 1..18: mol_type = other DNA
gcttttgtctaggctctg

SEQ ID NO: 32258 - DNA, 18 bp, synthetic construct
  source 1..18: mol_type = other DNA
ggcttttgtctaggctct

SEQ ID NO: 32259 - DNA, 18 bp, synthetic construct
  source 1..18: mol_type = other DNA
gggcttttgtctaggctc

SEQ ID NO: 32260 - DNA, 18 bp, synthetic construct
  source 1..18: mol_type = other DNA
ggggcttttgtctaggct

SEQ ID NO: 32261 - DNA, 18 bp, synthetic construct
  source 1..18: mol_type = other DNA
tggggcttttgtctaggc

SEQ ID NO: 32262 - DNA, 18 bp, synthetic construct
  source 1..18: mol_type = other DNA
atggggcttttgtctagg

SEQ ID NO: 32263 - DNA, 18 bp, synthetic construct
  source 1..18: mol_type = other DNA
gatggggcttttgtctag

SEQ ID NO: 32264 - DNA, 18 bp, synthetic construct
  source 1..18: mol_type = other DNA
tgatggggcttttgtcta

SEQ ID NO: 32265 - DNA, 18 bp, synthetic construct
  source 1..18: mol_type = other DNA
gtgatggggcttttgtct

SEQ ID NO: 32266 - DNA, 18 bp, synthetic construct
  source 1..18: mol_type = other DNA
ggtgatggggcttttgtc

SEQ ID NO: 32267 - DNA, 18 bp, synthetic construct
  source 1..18: mol_type = other DNA
aggtgatggggcttttgt

SEQ ID NO: 32268 - DNA, 18 bp, synthetic construct
  source 1..18: mol_type = other DNA
caggtgatggggcttttg

SEQ ID NO: 32269 - DNA, 18 bp, synthetic construct
  source 1..18: mol_type = other DNA
ccaggtgatggggctttt

SEQ ID NO: 32270 - DNA, 18 bp, synthetic construct
  source 1..18: mol_type = other DNA
tccaggtgatggggcttt

SEQ ID NO: 32271 - DNA, 18 bp, synthetic construct
  source 1..18: mol_type = other DNA
atccaggtgatggggctt

SEQ ID NO: 32272 - DNA, 18 bp, synthetic construct
  source 1..18: mol_type = other DNA
catccaggtgatggggct

SEQ ID NO: 32273 - DNA, 18 bp, synthetic construct
  source 1..18: mol_type = other DNA
tcatccaggtgatggggc

SEQ ID NO: 32274 - DNA, 18 bp, synthetic construct
  source 1..18: mol_type = other DNA
atcatccaggtgatgggg

SEQ ID NO: 32275 - DNA, 18 bp, synthetic construct
  source 1..18: mol_type = other DNA
aatcatccaggtgatggg

SEQ ID NO: 32276 - DNA, 18 bp, synthetic construct
  source 1..18: mol_type = other DNA
taatcatccaggtgatgg

SEQ ID NO: 32277 - DNA, 18 bp, synthetic construct
  source 1..18: mol_type = other DNA
ctaatcatccaggtgatg

SEQ ID NO: 32278 - DNA, 18 bp, synthetic construct
  source 1..18: mol_type = other DNA
actaatcatccaggtgat

SEQ ID NO: 32279 - DNA, 18 bp, synthetic construct
  source 1..18: mol_type = other DNA
cactaatcatccaggtga

SEQ ID NO: 32280 - DNA, 18 bp, synthetic construct
  source 1..18: mol_type = other DNA
gcactaatcatccaggtg

SEQ ID NO: 32281 - DNA, 18 bp, synthetic construct
  source 1..18: mol_type = other DNA
tgcactaatcatccaggt

SEQ ID NO: 32282 - DNA, 18 bp, synthetic construct
  source 1..18: mol_type = other DNA
ctgcactaatcatccagg

SEQ ID NO: 32283 - DNA, 18 bp, synthetic construct
  source 1..18: mol_type = other DNA
tctgcactaatcatccag

SEQ ID NO: 32284 - DNA, 18 bp, synthetic construct
  source 1..18: mol_type = other DNA
ctctgcactaatcatcca

SEQ ID NO: 32285 - DNA, 18 bp, synthetic construct
  source 1..18: mol_type = other DNA
actctgcactaatcatcc

SEQ ID NO: 32286 - DNA, 18 bp, synthetic construct
  source 1..18: mol_type = other DNA
aactctgcactaatcatc

SEQ ID NO: 32287 - DNA, 18 bp, synthetic construct
  source 1..18: mol_type = other DNA
tgacataactctgcacta

SEQ ID NO: 32288 - DNA, 18 bp, synthetic construct
  source 1..18: mol_type = other DNA
tttgtgacataactctgc

SEQ ID NO: 32289 - DNA, 18 bp, synthetic construct
  source 1..18: mol_type = other DNA
tggcattgtgacatatct

SEQ ID NO: 32290 - DNA, 18 bp, synthetic construct
  source 1..18: mol_type = other DNA
gtggcattgtgacatatc

SEQ ID NO: 32291 - DNA, 18 bp, synthetic construct
  source 1..18: mol_type = other DNA
agtggcattgtgacatat

SEQ ID NO: 32292 - DNA, 18 bp, synthetic construct
  source 1..18: mol_type = other DNA
cagtggcattgtgacata

SEQ ID NO: 32293 - DNA, 18 bp, synthetic construct
  source 1..18: mol_type = other DNA
acagtggcattgtgacat

SEQ ID NO: 32294 - DNA, 18 bp, synthetic construct
  source 1..18: mol_type = other DNA
tacagtggcattgtgaca

SEQ ID NO: 32295 - DNA, 18 bp, synthetic construct
  source 1..18: mol_type = other DNA
ctacagtggcattgtgac

SEQ ID NO: 32296 - DNA, 18 bp, synthetic construct
  source 1..18: mol_type = other DNA
cctacagtggcattgtga

SEQ ID NO: 32297 - DNA, 18 bp, synthetic construct
  source 1..18: mol_type = other DNA
gcctacagtggcattgtg

SEQ ID NO: 32298 - DNA, 18 bp, synthetic construct
  source 1..18: mol_type = other DNA
tgcctacagtggcattgt

SEQ ID NO: 32299 - DNA, 18 bp, synthetic construct
  source 1..18: mol_type = other DNA
ctgcctacagtggcattg

SEQ ID NO: 32300 - DNA, 18 bp, synthetic construct
  source 1..18: mol_type = other DNA
tctgcctacagtggcatt

SEQ ID NO: 32301 - DNA, 18 bp, synthetic construct
  source 1..18: mol_type = other DNA
ctctgcctacagtggcat

SEQ ID NO: 32302 - DNA, 18 bp, synthetic construct
  source 1..18: mol_type = other DNA
aggctctgcctacagtgg

SEQ ID NO: 32303 - DNA, 18 bp, synthetic construct
  source 1..18: mol_type = other DNA
taggctctgcctacagtg

SEQ ID NO: 32304 - DNA, 18 bp, synthetic construct
  source 1..18: mol_type = other DNA
ctaggctctgcctacagt

SEQ ID NO: 32305 - DNA, 18 bp, synthetic construct
  source 1..18: mol_type = other DNA
ataactcttgtctaggct

SEQ ID NO: 32306 - DNA, 18 bp, synthetic construct
  source 1..18: mol_type = other DNA
tataactcttgtctaggc

SEQ ID NO: 32307 - DNA, 18 bp, synthetic construct
  source 1..18: mol_type = other DNA
gtcatataactcttgtct

SEQ ID NO: 32308 - DNA, 18 bp, synthetic construct
  source 1..18: mol_type = other DNA
ggtcatataactcttgtc

SEQ ID NO: 32309 - DNA, 18 bp, synthetic construct
  source 1..18: mol_type = other DNA
aggtcatataactcttgt

SEQ ID NO: 32310 - DNA, 18 bp, synthetic construct
  source 1..18: mol_type = other DNA
cctaggtcatataactct

SEQ ID NO: 32311 - DNA, 18 bp, synthetic construct
  source 1..18: mol_type = other DNA
acctaggtcatataactc

SEQ ID NO: 32312 - DNA, 18 bp, synthetic construct
  source 1..18: mol_type = other DNA
cacctaggtcatataact

SEQ ID NO: 32313 - DNA, 18 bp, synthetic construct
  source 1..18: mol_type = other DNA
tcacctaggtcatataac

SEQ ID NO: 32314 - DNA, 18 bp, synthetic construct
  source 1..18: mol_type = other DNA
atcacctaggtcatataa

SEQ ID NO: 32315 - DNA, 18 bp, synthetic construct
  source 1..18: mol_type = other DNA
gatcacctaggtcatata

SEQ ID NO: 32316 - DNA, 18 bp, synthetic construct
  source 1..18: mol_type = other DNA
tgatcacctaggtcatat

SEQ ID NO: 32317 - DNA, 18 bp, synthetic construct
  source 1..18: mol_type = other DNA
ctgatcacctaggtcata

SEQ ID NO: 32318 - DNA, 18 bp, synthetic construct
  source 1..18: mol_type = other DNA
actgatcacctaggtcat

SEQ ID NO: 32319 - DNA, 18 bp, synthetic construct
  source 1..18: mol_type = other DNA
cactgatcacctaggtca

SEQ ID NO: 32320 - DNA, 18 bp, synthetic construct
  source 1..18: mol_type = other DNA
gcactgatcacctaggtc

SEQ ID NO: 32321 - DNA, 18 bp, synthetic construct
  source 1..18: mol_type = other DNA
tctgcactgatcacctag

SEQ ID NO: 32322 - DNA, 18 bp, synthetic construct
  source 1..18: mol_type = other DNA
tgtatctctgcactgatc

SEQ ID NO: 32323 - DNA, 18 bp, synthetic construct
  source 1..18: mol_type = other DNA
atgtatctctgcactgat

SEQ ID NO: 32324 - DNA, 18 bp, synthetic construct
  source 1..18: mol_type = other DNA
tgcctacaggggcattgc

SEQ ID NO: 32325 - DNA, 18 bp, synthetic construct
  source 1..18: mol_type = other DNA
cagggctctgcctacagg

SEQ ID NO: 32326 - DNA, 18 bp, synthetic construct
  source 1..18: mol_type = other DNA
tcagggctctgcctacag

SEQ ID NO: 32327 - DNA, 18 bp, synthetic construct
  source 1..18: mol_type = other DNA
ttgtcagggctctgccta

SEQ ID NO: 32328 - DNA, 18 bp, synthetic construct
  source 1..18: mol_type = other DNA
cacttgtcagggctctgc

SEQ ID NO: 32329 - DNA, 18 bp, synthetic construct
  source 1..18: mol_type = other DNA
ccacttgtcagggctctg

SEQ ID NO: 32330 - DNA, 18 bp, synthetic construct
  source 1..18: mol_type = other DNA
accacttgtcagggctct

SEQ ID NO: 32331 - DNA, 18 bp, synthetic construct
  source 1..18: mol_type = other DNA
taccacttgtcagggctc

SEQ ID NO: 32332 - DNA, 18 bp, synthetic construct
  source 1..18: mol_type = other DNA
gtaccacttgtcagggct

SEQ ID NO: 32333 - DNA, 18 bp, synthetic construct
  source 1..18: mol_type = other DNA
tgtaccacttgtcagggc

SEQ ID NO: 32334 - DNA, 18 bp, synthetic construct
  source 1..18: mol_type = other DNA
atgtaccacttgtcaggg

SEQ ID NO: 32335 - DNA, 18 bp, synthetic construct
  source 1..18: mol_type = other DNA
gatgtaccacttgtcagg

SEQ ID NO: 32336 - DNA, 18 bp, synthetic construct
  source 1..18: mol_type = other DNA
tgatgtaccacttgtcag

SEQ ID NO: 32337 - DNA, 18 bp, synthetic construct
  source 1..18: mol_type = other DNA
gtgatgtaccacttgtca

SEQ ID NO: 32338 - DNA, 18 bp, synthetic construct
  source 1..18: mol_type = other DNA
ggtgatgtaccacttgtc

SEQ ID NO: 32339 - DNA, 18 bp, synthetic construct
  source 1..18: mol_type = other DNA
aggtgatgtaccacttgt

SEQ ID NO: 32340 - DNA, 18 bp, synthetic construct
  source 1..18: mol_type = other DNA
caggtgatgtaccacttg

SEQ ID NO: 32341 - DNA, 18 bp, synthetic construct
  source 1..18: mol_type = other DNA
ccaggtgatgtaccactt

SEQ ID NO: 32342 - DNA, 18 bp, synthetic construct
  source 1..18: mol_type = other DNA
cccaggtgatgtaccact

SEQ ID NO: 32343 - DNA, 18 bp, synthetic construct
  source 1..18: mol_type = other DNA
acccaggtgatgtaccac

SEQ ID NO: 32344 - DNA, 18 bp, synthetic construct
  source 1..18: mol_type = other DNA
cacccaggtgatgtacca

SEQ ID NO: 32345 - DNA, 18 bp, synthetic construct
  source 1..18: mol_type = other DNA
tcacccaggtgatgtacc

SEQ ID NO: 32346 - DNA, 18 bp, synthetic construct
  source 1..18: mol_type = other DNA
atcacccaggtgatgtac

SEQ ID NO: 32347 - DNA, 18 bp, synthetic construct
  source 1..18: mol_type = other DNA
cctgcaatgatcacccag

SEQ ID NO: 32348 - DNA, 18 bp, synthetic construct
  source 1..18: mol_type = other DNA
ccctgcaatgatcaccca

SEQ ID NO: 32349 - DNA, 18 bp, synthetic construct
  source 1..18: mol_type = other DNA
tccctgcaatgatcaccc

SEQ ID NO: 32350 - DNA, 18 bp, synthetic construct
  source 1..18: mol_type = other DNA
atccctgcaatgatcacc

SEQ ID NO: 32351 - DNA, 18 bp, synthetic construct
  source 1..18: mol_type = other DNA
tatccctgcaatgatcac

SEQ ID NO: 32352 - DNA, 18 bp, synthetic construct
  source 1..18: mol_type = other DNA
atatccctgcaatgatca

SEQ ID NO: 32353 - DNA, 18 bp, synthetic construct
  source 1..18: mol_type = other DNA
catatccctgcaatgatc

SEQ ID NO: 32354 - DNA, 18 bp, synthetic construct
  source 1..18: mol_type = other DNA
acatatccctgcaatgat

SEQ ID NO: 32355 - DNA, 18 bp, synthetic construct
  source 1..18: mol_type = other DNA
gacatatccctgcaatga

SEQ ID NO: 32356 - DNA, 18 bp, synthetic construct
  source 1..18: mol_type = other DNA
tgacatatccctgcaatg

SEQ ID NO: 32357 - DNA, 18 bp, synthetic construct
  source 1..18: mol_type = other DNA
gtgacatatccctgcaat

SEQ ID NO: 32358 - DNA, 18 bp, synthetic construct
  source 1..18: mol_type = other DNA
tgtgacatatccctgcaa

SEQ ID NO: 32359 - DNA, 18 bp, synthetic construct
  source 1..18: mol_type = other DNA
ttgtgacatatccctgca

SEQ ID NO: 32360 - DNA, 18 bp, synthetic construct
  source 1..18: mol_type = other DNA
tttgtgacatatccctgc

SEQ ID NO: 32361 - DNA, 18 bp, synthetic construct
  source 1..18: mol_type = other DNA
ctttgtgacatatccctg

SEQ ID NO: 32362 - DNA, 18 bp, synthetic construct
  source 1..18: mol_type = other DNA
gctttgtgacatatccct

SEQ ID NO: 32363 - DNA, 18 bp, synthetic construct
  source 1..18: mol_type = other DNA
tgctttgtgacatatccc

SEQ ID NO: 32364 - DNA, 18 bp, synthetic construct
  source 1..18: mol_type = other DNA
gtgctttgtgacatatcc

SEQ ID NO: 32365 - DNA, 18 bp, synthetic construct
  source 1..18: mol_type = other DNA
ggtgctttgtgacatatc

SEQ ID NO: 32366 - DNA, 18 bp, synthetic construct
  source 1..18: mol_type = other DNA
gggtgctttgtgacatat

SEQ ID NO: 32367 - DNA, 18 bp, synthetic construct
  source 1..18: mol_type = other DNA
agggtgctttgtgacata

SEQ ID NO: 32368 - DNA, 18 bp, synthetic construct
  source 1..18: mol_type = other DNA
cagggtgctttgtgacat

SEQ ID NO: 32369 - DNA, 18 bp, synthetic construct
  source 1..18: mol_type = other DNA
acagggtgctttgtgaca

SEQ ID NO: 32370 - DNA, 18 bp, synthetic construct
  source 1..18: mol_type = other DNA
tacagggtgctttgtgac

SEQ ID NO: 32371 - DNA, 18 bp, synthetic construct
  source 1..18: mol_type = other DNA
ctacagggtgctttgtga

SEQ ID NO: 32372 - DNA, 18 bp, synthetic construct
  source 1..18: mol_type = other DNA
cctacagggtgctttgtg

SEQ ID NO: 32373 - DNA, 18 bp, synthetic construct
  source 1..18: mol_type = other DNA
gcctacagggtgctttgt

SEQ ID NO: 32374 - DNA, 18 bp, synthetic construct
  source 1..18: mol_type = other DNA
tgcctacagggtgctttg

SEQ ID NO: 32375 - DNA, 18 bp, synthetic construct
  source 1..18: mol_type = other DNA
ctgcctacagggtgcttt

SEQ ID NO: 32376 - DNA, 18 bp, synthetic construct
  source 1..18: mol_type = other DNA
tctgcctacagggtgctt

SEQ ID NO: 32377 - DNA, 18 bp, synthetic construct
  source 1..18: mol_type = other DNA
atctgcctacagggtgct

SEQ ID NO: 32378 - DNA, 18 bp, synthetic construct
  source 1..18: mol_type = other DNA
gatctgcctacagggtgc

SEQ ID NO: 32379 - DNA, 18 bp, synthetic construct
  source 1..18: mol_type = other DNA
ggatctgcctacagggtg

SEQ ID NO: 32380 - DNA, 18 bp, synthetic construct
  source 1..18: mol_type = other DNA
aggatctgcctacagggt

SEQ ID NO: 32381 - DNA, 18 bp, synthetic construct
  source 1..18: mol_type = other DNA
taactcttgtctaggatc

SEQ ID NO: 32382 - DNA, 18 bp, synthetic construct
  source 1..18: mol_type = other DNA
gtaactcttgtctaggat

SEQ ID NO: 32383 - DNA, 18 bp, synthetic construct
  source 1..18: mol_type = other DNA
tgtaactcttgtctagga

SEQ ID NO: 32384 - DNA, 18 bp, synthetic construct
  source 1..18: mol_type = other DNA
catgtaactcttgtctag

SEQ ID NO: 32385 - DNA, 18 bp, synthetic construct
  source 1..18: mol_type = other DNA
tcatgtaactcttgtcta

SEQ ID NO: 32386 - DNA, 18 bp, synthetic construct
  source 1..18: mol_type = other DNA
gtcatgtaactcttgtct

SEQ ID NO: 32387 - DNA, 18 bp, synthetic construct
  source 1..18: mol_type = other DNA
ggtcatgtaactcttgtc

SEQ ID NO: 32388 - DNA, 18 bp, synthetic construct
  source 1..18: mol_type = other DNA
aggtcatgtaactcttgt

SEQ ID NO: 32389 - DNA, 18 bp, synthetic construct
  source 1..18: mol_type = other DNA
caggtcatgtaactcttg

SEQ ID NO: 32390 - DNA, 18 bp, synthetic construct
  source 1..18: mol_type = other DNA
ccaggtcatgtaactctt

SEQ ID NO: 32391 - DNA, 18 bp, synthetic construct
  source 1..18: mol_type = other DNA
cccaggtcatgtaactct

SEQ ID NO: 32392 - DNA, 18 bp, synthetic construct
  source 1..18: mol_type = other DNA
acccaggtcatgtaactc

SEQ ID NO: 32393 - DNA, 18 bp, synthetic construct
  source 1..18: mol_type = other DNA
cacccaggtcatgtaact

SEQ ID NO: 32394 - DNA, 18 bp, synthetic construct
  source 1..18: mol_type = other DNA
tcacccaggtcatgtaac

SEQ ID NO: 32395 - DNA, 18 bp, synthetic construct
  source 1..18: mol_type = other DNA
atcacccaggtcatgtaa

SEQ ID NO: 32396 - DNA, 18 bp, synthetic construct
  source 1..18: mol_type = other DNA
gatcacccaggtcatgta

SEQ ID NO: 32397 - DNA, 18 bp, synthetic construct
  source 1..18: mol_type = other DNA
tgatcacccaggtcatgt

SEQ ID NO: 32398 - DNA, 18 bp, synthetic construct
  source 1..18: mol_type = other DNA
ctgatcacccaggtcatg

SEQ ID NO: 32399 - DNA, 18 bp, synthetic construct
  source 1..18: mol_type = other DNA
actgatcacccaggtcat

SEQ ID NO: 32400 - DNA, 18 bp, synthetic construct
  source 1..18: mol_type = other DNA
cactgatcacccaggtca

SEQ ID NO: 32401 - DNA, 18 bp, synthetic construct
  source 1..18: mol_type = other DNA
gcactgatcacccaggtc

SEQ ID NO: 32402 - DNA, 18 bp, synthetic construct
  source 1..18: mol_type = other DNA
taggtcatgtaactcttg

SEQ ID NO: 32403 - DNA, 18 bp, synthetic construct
  source 1..18: mol_type = other DNA
ctaggtcatgtaactctt

SEQ ID NO: 32404 - DNA, 18 bp, synthetic construct
  source 1..18: mol_type = other DNA
cctaggtcatgtaactct

SEQ ID NO: 32405 - DNA, 18 bp, synthetic construct
  source 1..18: mol_type = other DNA
acctaggtcatgtaactc

SEQ ID NO: 32406 - DNA, 18 bp, synthetic construct
  source 1..18: mol_type = other DNA
cacctaggtcatgtaact

SEQ ID NO: 32407 - DNA, 18 bp, synthetic construct
  source 1..18: mol_type = other DNA
tcacctaggtcatgtaac

SEQ ID NO: 32408 - DNA, 18 bp, synthetic construct
  source 1..18: mol_type = other DNA
atcacctaggtcatgtaa

SEQ ID NO: 32409 - DNA, 18 bp, synthetic construct
  source 1..18: mol_type = other DNA
gatcacctaggtcatgta

SEQ ID NO: 32410 - DNA, 18 bp, synthetic construct
  source 1..18: mol_type = other DNA
tgatcacctaggtcatgt

SEQ ID NO: 32411 - DNA, 18 bp, synthetic construct
  source 1..18: mol_type = other DNA
ctgatcacctaggtcatg

SEQ ID NO: 32412 - DNA, 18 bp, synthetic construct
  source 1..18: mol_type = other DNA
gatgtatctctgcactga

SEQ ID NO: 32413 - DNA, 18 bp, synthetic construct
  source 1..18: mol_type = other DNA
cgatgtatctctgcactg

SEQ ID NO: 32414 - DNA, 18 bp, synthetic construct
  source 1..18: mol_type = other DNA
gcgatgtatctctgcact

SEQ ID NO: 32415 - DNA, 18 bp, synthetic construct
  source 1..18: mol_type = other DNA
tgcgatgtatctctgcac

SEQ ID NO: 32416 - DNA, 18 bp, synthetic construct
  source 1..18: mol_type = other DNA
ttgcgatgtatctctgca

SEQ ID NO: 32417 - DNA, 18 bp, synthetic construct
  source 1..18: mol_type = other DNA
attgcgatgtatctctgc

SEQ ID NO: 32418 - DNA, 18 bp, synthetic construct
  source 1..18: mol_type = other DNA
cattgcgatgtatctctg

SEQ ID NO: 32419 - DNA, 18 bp, synthetic construct
  source 1..18: mol_type = other DNA
gcattgcgatgtatctct

SEQ ID NO: 32420 - DNA, 18 bp, synthetic construct
  source 1..18: mol_type = other DNA
ggcattgcgatgtatctc

SEQ ID NO: 32421 - DNA, 18 bp, synthetic construct
  source 1..18: mol_type = other DNA
gggcattgcgatgtatct

SEQ ID NO: 32422 - DNA, 18 bp, synthetic construct
  source 1..18: mol_type = other DNA
ggggcattgcgatgtatc

SEQ ID NO: 32423 - DNA, 18 bp, synthetic construct
  source 1..18: mol_type = other DNA
aggggcattgcgatgtat

SEQ ID NO: 32424 - DNA, 18 bp, synthetic construct
  source 1..18: mol_type = other DNA
caggggcattgcgatgta

SEQ ID NO: 32425 - DNA, 18 bp, synthetic construct
  source 1..18: mol_type = other DNA
acaggggcattgcgatgt

SEQ ID NO: 32426 - DNA, 18 bp, synthetic construct
  source 1..18: mol_type = other DNA
tacaggggcattgcgatg

SEQ ID NO: 32427 - DNA, 18 bp, synthetic construct
  source 1..18: mol_type = other DNA
ctacaggggcattgcgat

SEQ ID NO: 32428 - DNA, 18 bp, synthetic construct
  source 1..18: mol_type = other DNA
cctacaggggcattgcga

SEQ ID NO: 32429 - DNA, 18 bp, synthetic construct
  source 1..18: mol_type = other DNA
gcctacaggggcattgcg

SEQ ID NO: 32430 - DNA, 18 bp, synthetic construct
  source 1..18: mol_type = other DNA
aaggctctgcctacaggg

SEQ ID NO: 32431 - DNA, 18 bp, synthetic construct
  source 1..18: mol_type = other DNA
caaggctctgcctacagg

SEQ ID NO: 32432 - DNA, 18 bp, synthetic construct
  source 1..18: mol_type = other DNA
tcaaggctctgcctacag

SEQ ID NO: 32433 - DNA, 18 bp, synthetic construct
  source 1..18: mol_type = other DNA
gtcaaggctctgcctaca

SEQ ID NO: 32434 - DNA, 18 bp, synthetic construct
  source 1..18: mol_type = other DNA
tgtcaaggctctgcctac

SEQ ID NO: 32435 - DNA, 18 bp, synthetic construct
  source 1..18: mol_type = other DNA
ttgtcaaggctctgccta

SEQ ID NO: 32436 - DNA, 18 bp, synthetic construct
  source 1..18: mol_type = other DNA
cttgtcaaggctctgcct

SEQ ID NO: 32437 - DNA, 18 bp, synthetic construct
  source 1..18: mol_type = other DNA
acttgtcaaggctctgcc

SEQ ID NO: 32438 - DNA, 18 bp, synthetic construct
  source 1..18: mol_type = other DNA
cacttgtcaaggctctgc

SEQ ID NO: 32439 - DNA, 18 bp, synthetic construct
  source 1..18: mol_type = other DNA
ccacttgtcaaggctctg

SEQ ID NO: 32440 - DNA, 18 bp, synthetic construct
  source 1..18: mol_type = other DNA
accacttgtcaaggctct

SEQ ID NO: 32441 - DNA, 18 bp, synthetic construct
  source 1..18: mol_type = other DNA
taccacttgtcaaggctc

SEQ ID NO: 32442 - DNA, 18 bp, synthetic construct
  source 1..18: mol_type = other DNA
gtaccacttgtcaaggct

SEQ ID NO: 32443 - DNA, 18 bp, synthetic construct
  source 1..18: mol_type = other DNA
tgtaccacttgtcaaggc

SEQ ID NO: 32444 - DNA, 18 bp, synthetic construct
  source 1..18: mol_type = other DNA
atgtaccacttgtcaagg

SEQ ID NO: 32445 - DNA, 18 bp, synthetic construct
  source 1..18: mol_type = other DNA
gatgtaccacttgtcaag

SEQ ID NO: 32446 - DNA, 18 bp, synthetic construct
  source 1..18: mol_type = other DNA
tgatgtaccacttgtcaa

SEQ ID NO: 32447 - DNA, 18 bp, synthetic construct
  source 1..18: mol_type = other DNA
ttacagggtgctttgtga

SEQ ID NO: 32448 - DNA, 18 bp, synthetic construct
  source 1..18: mol_type = other DNA
cttacagggtgctttgtg

SEQ ID NO: 32449 - DNA, 18 bp, synthetic construct
  source 1..18: mol_type = other DNA
gcttacagggtgctttgt

SEQ ID NO: 32450 - DNA, 18 bp, synthetic construct
  source 1..18: mol_type = other DNA
tgcttacagggtgctttg

SEQ ID NO: 32451 - DNA, 18 bp, synthetic construct
  source 1..18: mol_type = other DNA
ctgcttacagggtgcttt

SEQ ID NO: 32452 - DNA, 18 bp, synthetic construct
  source 1..18: mol_type = other DNA
tctgcttacagggtgctt

SEQ ID NO: 32453 - DNA, 18 bp, synthetic construct
  source 1..18: mol_type = other DNA
atctgcttacagggtgct

SEQ ID NO: 32454 - DNA, 18 bp, synthetic construct
  source 1..18: mol_type = other DNA
gatctgcttacagggtgc

SEQ ID NO: 32455 - DNA, 18 bp, synthetic construct
  source 1..18: mol_type = other DNA
ggatctgcttacagggtg

SEQ ID NO: 32456 - DNA, 18 bp, synthetic construct
  source 1..18: mol_type = other DNA
aggatctgcttacagggt

SEQ ID NO: 32457 - DNA, 18 bp, synthetic construct
  source 1..18: mol_type = other DNA
taggatctgcttacaggg

SEQ ID NO: 32458 - DNA, 18 bp, synthetic construct
  source 1..18: mol_type = other DNA
ctaggatctgcttacagg

SEQ ID NO: 32459 - DNA, 18 bp, synthetic construct
  source 1..18: mol_type = other DNA
tctaggatctgcttacag

SEQ ID NO: 32460 - DNA, 18 bp, synthetic construct
  source 1..18: mol_type = other DNA
ctctaggatctgcttaca

SEQ ID NO: 32461 - DNA, 18 bp, synthetic construct
  source 1..18: mol_type = other DNA
tctctaggatctgcttac

SEQ ID NO: 32462 - DNA, 18 bp, synthetic construct
  source 1..18: mol_type = other DNA
ttctctaggatctgctta

SEQ ID NO: 32463 - DNA, 18 bp, synthetic construct
  source 1..18: mol_type = other DNA
cttctctaggatctgctt

SEQ ID NO: 32464 - DNA, 18 bp, synthetic construct
  source 1..18: mol_type = other DNA
tcttctctaggatctgct

SEQ ID NO: 32465 - DNA, 18 bp, synthetic construct
  source 1..18: mol_type = other DNA
ctcttctctaggatctgc

SEQ ID NO: 32466 - DNA, 18 bp, synthetic construct
  source 1..18: mol_type = other DNA
actcttctctaggatctg

SEQ ID NO: 32467 - DNA, 18 bp, synthetic construct
  source 1..18: mol_type = other DNA
aactcttctctaggatct

SEQ ID NO: 32468 - DNA, 18 bp, synthetic construct
  source 1..18: mol_type = other DNA
taactcttctctaggatc

SEQ ID NO: 32469 - DNA, 18 bp, synthetic construct
  source 1..18: mol_type = other DNA
ataactcttctctaggat

SEQ ID NO: 32470 - DNA, 18 bp, synthetic construct
  source 1..18: mol_type = other DNA
gtgatataactcttctct

SEQ ID NO: 32471 - DNA, 18 bp, synthetic construct
  source 1..18: mol_type = other DNA
ggtgatataactcttctc

SEQ ID NO: 32472 - DNA, 18 bp, synthetic construct
  source 1..18: mol_type = other DNA
aggtgatataactcttct

SEQ ID NO: 32473 - DNA, 18 bp, synthetic construct
  source 1..18: mol_type = other DNA
ccaggtgatataactctt

SEQ ID NO: 32474 - DNA, 18 bp, synthetic construct
  source 1..18: mol_type = other DNA
cccaggtgatataactct

SEQ ID NO: 32475 - DNA, 18 bp, synthetic construct
  source 1..18: mol_type = other DNA
acccaggtgatataactc

SEQ ID NO: 32476 - DNA, 18 bp, synthetic construct
  source 1..18: mol_type = other DNA
cacccaggtgatataact

SEQ ID NO: 32477 - DNA, 18 bp, synthetic construct
  source 1..18: mol_type = other DNA
tcacccaggtgatataac

SEQ ID NO: 32478 - DNA, 18 bp, synthetic construct
  source 1..18: mol_type = other DNA
atcacccaggtgatataa

SEQ ID NO: 32479 - DNA, 18 bp, synthetic construct
  source 1..18: mol_type = other DNA
gatcacccaggtgatata

SEQ ID NO: 32480 - DNA, 18 bp, synthetic construct
  source 1..18: mol_type = other DNA
tgatcacccaggtgatat

SEQ ID NO: 32481 - DNA, 18 bp, synthetic construct
  source 1..18: mol_type = other DNA
ctgatcacccaggtgata

SEQ ID NO: 32482 - DNA, 18 bp, synthetic construct
  source 1..18: mol_type = other DNA
cttgtgacatatctctgc

SEQ ID NO: 32483 - DNA, 18 bp, synthetic construct
  source 1..18: mol_type = other DNA
gcttgtgacatatctctg

SEQ ID NO: 32484 - DNA, 18 bp, synthetic construct
  source 1..18: mol_type = other DNA
ggcttgtgacatatctct

SEQ ID NO: 32485 - DNA, 18 bp, synthetic construct
  source 1..18: mol_type = other DNA
gggcttgtgacatatctc

SEQ ID NO: 32486 - DNA, 18 bp, synthetic construct
  source 1..18: mol_type = other DNA
ggggcttgtgacatatct

SEQ ID NO: 32487 - DNA, 18 bp, synthetic construct
  source 1..18: mol_type = other DNA
gggggcttgtgacatatc

SEQ ID NO: 32488 - DNA, 18 bp, synthetic construct
  source 1..18: mol_type = other DNA
agggggcttgtgacatat

SEQ ID NO: 32489 - DNA, 18 bp, synthetic construct
  source 1..18: mol_type = other DNA
cagggggcttgtgacata

SEQ ID NO: 32490 - DNA, 18 bp, synthetic construct
  source 1..18: mol_type = other DNA
acagggggcttgtgacat

SEQ ID NO: 32491 - DNA, 18 bp, synthetic construct
  source 1..18: mol_type = other DNA
tacagggggcttgtgaca

SEQ ID NO: 32492 - DNA, 18 bp, synthetic construct
  source 1..18: mol_type = other DNA
ctacagggggcttgtgac

SEQ ID NO: 32493 - DNA, 18 bp, synthetic construct
  source 1..18: mol_type = other DNA
cctacagggggcttgtga

SEQ ID NO: 32494 - DNA, 18 bp, synthetic construct
  source 1..18: mol_type = other DNA
ctgcctacagggggcttg

SEQ ID NO: 32495 - DNA, 18 bp, synthetic construct
  source 1..18: mol_type = other DNA
gtgatataactcttgtct

SEQ ID NO: 32496 - DNA, 18 bp, synthetic construct
  source 1..18: mol_type = other DNA
ggtgatataactcttgtc

SEQ ID NO: 32497 - DNA, 18 bp, synthetic construct
  source 1..18: mol_type = other DNA
actgcactgatcacccag

SEQ ID NO: 32498 - DNA, 18 bp, synthetic construct
  source 1..18: mol_type = other DNA
cactgcactgatcaccca

SEQ ID NO: 32499 - DNA, 18 bp, synthetic construct
  source 1..18: mol_type = other DNA
tcactgcactgatcaccc

SEQ ID NO: 32500 - DNA, 18 bp, synthetic construct
  source 1..18: mol_type = other DNA
tctaggctctggctacac

SEQ ID NO: 32501 - DNA, 18 bp, synthetic construct
  source 1..18: mol_type = other DNA
gtctaggctctggctaca

SEQ ID NO: 32502 - DNA, 18 bp, synthetic construct
  source 1..18: mol_type = other DNA
cccaggtgctgtaacttt

SEQ ID NO: 32503 - DNA, 18 bp, synthetic construct
  source 1..18: mol_type = other DNA
tcccaggtgctgtaactt

SEQ ID NO: 32504 - DNA, 18 bp, synthetic construct
  source 1..18: mol_type = other DNA
ctcccaggtgctgtaact

SEQ ID NO: 32505 - DNA, 18 bp, synthetic construct
  source 1..18: mol_type = other DNA
tctcccaggtgctgtaac

SEQ ID NO: 32506 - DNA, 18 bp, synthetic construct
  source 1..18: mol_type = other DNA
atctcccaggtgctgtaa

SEQ ID NO: 32507 - DNA, 18 bp, synthetic construct
  source 1..18: mol_type = other DNA
gatctcccaggtgctgta

SEQ ID NO: 32508 - DNA, 18 bp, synthetic construct
  source 1..18: mol_type = other DNA
tgatctcccaggtgctgt

SEQ ID NO: 32509 - DNA, 18 bp, synthetic construct
  source 1..18: mol_type = other DNA
ctgatctcccaggtgctg

SEQ ID NO: 32510 - DNA, 18 bp, synthetic construct
  source 1..18: mol_type = other DNA
actgatctcccaggtgct

SEQ ID NO: 32511 - DNA, 18 bp, synthetic construct
  source 1..18: mol_type = other DNA
cactgatctcccaggtgc

SEQ ID NO: 32512 - DNA, 18 bp, synthetic construct
  source 1..18: mol_type = other DNA
gcactgatctcccaggtg

SEQ ID NO: 32513 - DNA, 18 bp, synthetic construct
  source 1..18: mol_type = other DNA
tgcactgatctcccaggt

SEQ ID NO: 32514 - DNA, 18 bp, synthetic construct
  source 1..18: mol_type = other DNA
ctgcactgatctcccagg

SEQ ID NO: 32515 - DNA, 18 bp, synthetic construct
  source 1..18: mol_type = other DNA
tctgcactgatctcccag

SEQ ID NO: 32516 - DNA, 18 bp, synthetic construct
  source 1..18: mol_type = other DNA
ctctgcactgatctccca

SEQ ID NO: 32517 - DNA, 18 bp, synthetic construct
  source 1..18: mol_type = other DNA
tctctgcactgatctccc

SEQ ID NO: 32518 - DNA, 18 bp, synthetic construct
  source 1..18: mol_type = other DNA
atctctgcactgatctcc

SEQ ID NO: 32519 - DNA, 18 bp, synthetic construct
  source 1..18: mol_type = other DNA
tatctctgcactgatctc

SEQ ID NO: 32520 - DNA, 18 bp, synthetic construct
  source 1..18: mol_type = other DNA
atatctctgcactgatct

SEQ ID NO: 32521 - DNA, 18 bp, synthetic construct
  source 1..18: mol_type = other DNA
tggggacattgtgacata

SEQ ID NO: 32522 - DNA, 18 bp, synthetic construct
  source 1..18: mol_type = other DNA
ctggggacattgtgacat

SEQ ID NO: 32523 - DNA, 18 bp, synthetic construct
  source 1..18: mol_type = other DNA
actggggacattgtgaca

SEQ ID NO: 32524 - DNA, 18 bp, synthetic construct
  source 1..18: mol_type = other DNA
tactggggacattgtgac

SEQ ID NO: 32525 - DNA, 18 bp, synthetic construct
  source 1..18: mol_type = other DNA
ctactggggacattgtga

SEQ ID NO: 32526 - DNA, 18 bp, synthetic construct
  source 1..18: mol_type = other DNA
cctactggggacattgtg

SEQ ID NO: 32527 - DNA, 18 bp, synthetic construct
  source 1..18: mol_type = other DNA
gcctactggggacattgt

SEQ ID NO: 32528 - DNA, 18 bp, synthetic construct
  source 1..18: mol_type = other DNA
tgcctactggggacattg

SEQ ID NO: 32529 - DNA, 18 bp, synthetic construct
  source 1..18: mol_type = other DNA
ctgcctactggggacatt

SEQ ID NO: 32530 - DNA, 18 bp, synthetic construct
  source 1..18: mol_type = other DNA
tctgcctactggggacat

SEQ ID NO: 32531 - DNA, 18 bp, synthetic construct
  source 1..18: mol_type = other DNA
ctctgcctactggggaca

SEQ ID NO: 32532 - DNA, 18 bp, synthetic construct
  source 1..18: mol_type = other DNA
tctctgcctactggggac

SEQ ID NO: 32533 - DNA, 18 bp, synthetic construct
  source 1..18: mol_type = other DNA
tggtctctgcctactggg

SEQ ID NO: 32534 - DNA, 18 bp, synthetic construct
  source 1..18: mol_type = other DNA
ctggtctctgcctactgg

SEQ ID NO: 32535 - DNA, 18 bp, synthetic construct
  source 1..18: mol_type = other DNA
cctggtctctgcctactg

SEQ ID NO: 32536 - DNA, 18 bp, synthetic construct
  source 1..18: mol_type = other DNA
actcttgcctggtctctg

SEQ ID NO: 32537 - DNA, 18 bp, synthetic construct
  source 1..18: mol_type = other DNA
aactcttgcctggtctct

SEQ ID NO: 32538 - DNA, 18 bp, synthetic construct
  source 1..18: mol_type = other DNA
caactcttgcctggtctc

SEQ ID NO: 32539 - DNA, 18 bp, synthetic construct
  source 1..18: mol_type = other DNA
ccaactcttgcctggtct

SEQ ID NO: 32540 - DNA, 18 bp, synthetic construct
  source 1..18: mol_type = other DNA
tccaactcttgcctggtc

SEQ ID NO: 32541 - DNA, 18 bp, synthetic construct
  source 1..18: mol_type = other DNA
atccaactcttgcctggt

SEQ ID NO: 32542 - DNA, 18 bp, synthetic construct
  source 1..18: mol_type = other DNA
gatccaactcttgcctgg

SEQ ID NO: 32543 - DNA, 18 bp, synthetic construct
  source 1..18: mol_type = other DNA
tgatccaactcttgcctg

SEQ ID NO: 32544 - DNA, 18 bp, synthetic construct
  source 1..18: mol_type = other DNA
gtgatccaactcttgcct

SEQ ID NO: 32545 - DNA, 18 bp, synthetic construct
  source 1..18: mol_type = other DNA
ggtgatccaactcttgcc

SEQ ID NO: 32546 - DNA, 18 bp, synthetic construct
  source 1..18: mol_type = other DNA
aggtgatccaactcttgc

SEQ ID NO: 32547 - DNA, 18 bp, synthetic construct
  source 1..18: mol_type = other DNA
gaggtgatccaactcttg

SEQ ID NO: 32548 - DNA, 18 bp, synthetic construct
  source 1..18: mol_type = other DNA
cgaggtgatccaactctt

SEQ ID NO: 32549 - DNA, 18 bp, synthetic construct
  source 1..18: mol_type = other DNA
ccgaggtgatccaactct

SEQ ID NO: 32550 - DNA, 18 bp, synthetic construct
  source 1..18: mol_type = other DNA
cccgaggtgatccaactc

SEQ ID NO: 32551 - DNA, 18 bp, synthetic construct
  source 1..18: mol_type = other DNA
tcccgaggtgatccaact

SEQ ID NO: 32552 - DNA, 18 bp, synthetic construct
  source 1..18: mol_type = other DNA
atcccgaggtgatccaac

SEQ ID NO: 32553 - DNA, 18 bp, synthetic construct
  source 1..18: mol_type = other DNA
gatcccgaggtgatccaa

SEQ ID NO: 32554 - DNA, 18 bp, synthetic construct
  source 1..18: mol_type = other DNA
tgatcccgaggtgatcca

SEQ ID NO: 32555 - DNA, 18 bp, synthetic construct
  source 1..18: mol_type = other DNA
ctgatcccgaggtgatcc

SEQ ID NO: 32556 - DNA, 18 bp, synthetic construct
  source 1..18: mol_type = other DNA
actgatcccgaggtgatc

SEQ ID NO: 32557 - DNA, 18 bp, synthetic construct
  source 1..18: mol_type = other DNA
cactgatcccgaggtgat

SEQ ID NO: 32558 - DNA, 18 bp, synthetic construct
  source 1..18: mol_type = other DNA
gcactgatcccgaggtga

SEQ ID NO: 32559 - DNA, 18 bp, synthetic construct
  source 1..18: mol_type = other DNA
tgcactgatcccgaggtg

SEQ ID NO: 32560 - DNA, 18 bp, synthetic construct
  source 1..18: mol_type = other DNA
ctgcactgatcccgaggt

SEQ ID NO: 32561 - DNA, 18 bp, synthetic construct
  source 1..18: mol_type = other DNA
tctgcactgatcccgagg

SEQ ID NO: 32562 - DNA, 18 bp, synthetic construct
  source 1..18: mol_type = other DNA
ctctgcactgatcccgag

SEQ ID NO: 32563 - DNA, 18 bp, synthetic construct
  source 1..18: mol_type = other DNA
tctctgcactgatcccga

SEQ ID NO: 32564 - DNA, 18 bp, synthetic construct
  source 1..18: mol_type = other DNA
atctctgcactgatcccg

SEQ ID NO: 32565 - DNA, 18 bp, synthetic construct
  source 1..18: mol_type = other DNA
atatctctgcactgatcc

SEQ ID NO: 32566 - DNA, 18 bp, synthetic construct
  source 1..18: mol_type = other DNA
agacatatctctgcactg

SEQ ID NO: 32567 - DNA, 18 bp, synthetic construct
  source 1..18: mol_type = other DNA
gagacatatctctgcact

SEQ ID NO: 32568 - DNA, 18 bp, synthetic construct
  source 1..18: mol_type = other DNA
tgagacatatctctgcac

SEQ ID NO: 32569 - DNA, 18 bp, synthetic construct
  source 1..18: mol_type = other DNA
ttgagacatatctctgca

SEQ ID NO: 32570 - DNA, 18 bp, synthetic construct
  source 1..18: mol_type = other DNA
attgagacatatctctgc

SEQ ID NO: 32571 - DNA, 18 bp, synthetic construct
  source 1..18: mol_type = other DNA
ggattgagacatatctct

SEQ ID NO: 32572 - DNA, 18 bp, synthetic construct
  source 1..18: mol_type = other DNA
gggattgagacatatctc

SEQ ID NO: 32573 - DNA, 18 bp, synthetic construct
  source 1..18: mol_type = other DNA
ggggattgagacatatct

SEQ ID NO: 32574 - DNA, 18 bp, synthetic construct
  source 1..18: mol_type = other DNA
gggggattgagacatatc

SEQ ID NO: 32575 - DNA, 18 bp, synthetic construct
  source 1..18: mol_type = other DNA
agggggattgagacatat

SEQ ID NO: 32576 - DNA, 18 bp, synthetic construct
  source 1..18: mol_type = other DNA
cagggggattgagacata

SEQ ID NO: 32577 - DNA, 18 bp, synthetic construct
  source 1..18: mol_type = other DNA
acagggggattgagacat

SEQ ID NO: 32578 - DNA, 18 bp, synthetic construct
  source 1..18: mol_type = other DNA
cacagggggattgagaca

SEQ ID NO: 32579 - DNA, 18 bp, synthetic construct
  source 1..18: mol_type = other DNA
ccacagggggattgagac

SEQ ID NO: 32580 - DNA, 18 bp, synthetic construct
  source 1..18: mol_type = other DNA
cccacagggggattgaga

SEQ ID NO: 32581 - DNA, 18 bp, synthetic construct
  source 1..18: mol_type = other DNA
gcccacagggggattgag

SEQ ID NO: 32582 - DNA, 18 bp, synthetic construct
  source 1..18: mol_type = other DNA
tgcccacagggggattga

SEQ ID NO: 32583 - DNA, 18 bp, synthetic construct
  source 1..18: mol_type = other DNA
gtgcccacagggggattg

SEQ ID NO: 32584 - DNA, 18 bp, synthetic construct
  source 1..18: mol_type = other DNA
tgtgcccacagggggatt

SEQ ID NO: 32585 - DNA, 18 bp, synthetic construct
  source 1..18: mol_type = other DNA
tctaggctgtgcccacag

SEQ ID NO: 32586 - DNA, 18 bp, synthetic construct
  source 1..18: mol_type = other DNA
tcttgtctaggctgtgcc

SEQ ID NO: 32587 - DNA, 18 bp, synthetic construct
  source 1..18: mol_type = other DNA
ctcttgtctaggctgtgc

SEQ ID NO: 32588 - DNA, 18 bp, synthetic construct
  source 1..18: mol_type = other DNA
actcttgtctaggctgtg

SEQ ID NO: 32589 - DNA, 18 bp, synthetic construct
  source 1..18: mol_type = other DNA
aactcttgtctaggctgt

SEQ ID NO: 32590 - DNA, 18 bp, synthetic construct
  source 1..18: mol_type = other DNA
taactcttgtctaggctg

SEQ ID NO: 32591 - DNA, 18 bp, synthetic construct
  source 1..18: mol_type = other DNA
actgttaaccgaggtgat

SEQ ID NO: 32592 - DNA, 18 bp, synthetic construct
  source 1..18: mol_type = other DNA
cactgttaaccgaggtga

SEQ ID NO: 32593 - DNA, 18 bp, synthetic construct
  source 1..18: mol_type = other DNA
gcactgttaaccgaggtg

SEQ ID NO: 32594 - DNA, 18 bp, synthetic construct
  source 1..18: mol_type = other DNA
tgcactgttaaccgaggt

SEQ ID NO: 32595 - DNA, 18 bp, synthetic construct
  source 1..18: mol_type = other DNA
ctgcactgttaaccgagg

SEQ ID NO: 32596 - DNA, 18 bp, synthetic construct
  source 1..18: mol_type = other DNA
tctgcactgttaaccgag

SEQ ID NO: 32597 - DNA, 18 bp, synthetic construct
  source 1..18: mol_type = other DNA
ctctgcactgttaaccga

SEQ ID NO: 32598 - DNA, 18 bp, synthetic construct
  source 1..18: mol_type = other DNA
tctctgcactgttaaccg

SEQ ID NO: 32599 - DNA, 18 bp, synthetic construct
  source 1..18: mol_type = other DNA
atctctgcactgttaacc

SEQ ID NO: 32600 - DNA, 18 bp, synthetic construct
  source 1..18: mol_type = other DNA
tatctctgcactgttaac

SEQ ID NO: 32601 - DNA, 18 bp, synthetic construct
  source 1..18: mol_type = other DNA
atatctctgcactgttaa

SEQ ID NO: 32602 - DNA, 18 bp, synthetic construct
  source 1..18: mol_type = other DNA
catatctctgcactgtta

SEQ ID NO: 32603 - DNA, 18 bp, synthetic construct
  source 1..18: mol_type = other DNA
acatatctctgcactgtt

SEQ ID NO: 32604 - DNA, 18 bp, synthetic construct
  source 1..18: mol_type = other DNA
gacatatctctgcactgt

SEQ ID NO: 32605 - DNA, 18 bp, synthetic construct
  source 1..18: mol_type = other DNA
ttgacatatctctgcact

SEQ ID NO: 32606 - DNA, 18 bp, synthetic construct
  source 1..18: mol_type = other DNA
tttgacatatctctgcac

SEQ ID NO: 32607 - DNA, 18 bp, synthetic construct
  source 1..18: mol_type = other DNA
ttttgacatatctctgca

SEQ ID NO: 32608 - DNA, 18 bp, synthetic construct
  source 1..18: mol_type = other DNA
attttgacatatctctgc

SEQ ID NO: 32609 - DNA, 18 bp, synthetic construct
  source 1..18: mol_type = other DNA
gcattttgacatatctct

SEQ ID NO: 32610 - DNA, 18 bp, synthetic construct
  source 1..18: mol_type = other DNA
ggcattttgacatatctc

SEQ ID NO: 32611 - DNA, 18 bp, synthetic construct
  source 1..18: mol_type = other DNA
gggcattttgacatatct

SEQ ID NO: 32612 - DNA, 18 bp, synthetic construct
  source 1..18: mol_type = other DNA
ggggcattttgacatatc

SEQ ID NO: 32613 - DNA, 18 bp, synthetic construct
  source 1..18: mol_type = other DNA
aggggcattttgacatat

SEQ ID NO: 32614 - DNA, 18 bp, synthetic construct
  source 1..18: mol_type = other DNA
caggggcattttgacata

SEQ ID NO: 32615 - DNA, 18 bp, synthetic construct
  source 1..18: mol_type = other DNA
acaggggcattttgacat

SEQ ID NO: 32616 - DNA, 18 bp, synthetic construct
  source 1..18: mol_type = other DNA
tacaggggcattttgaca

SEQ ID NO: 32617 - DNA, 18 bp, synthetic construct
  source 1..18: mol_type = other DNA
ctacaggggcattttgac

SEQ ID NO: 32618 - DNA, 18 bp, synthetic construct
  source 1..18: mol_type = other DNA
cctacaggggcattttga

SEQ ID NO: 32619 - DNA, 18 bp, synthetic construct
  source 1..18: mol_type = other DNA
gcctacaggggcattttg

SEQ ID NO: 32620 - DNA, 18 bp, synthetic construct
  source 1..18: mol_type = other DNA
tgcctacaggggcatttt

SEQ ID NO: 32621 - DNA, 18 bp, synthetic construct
  source 1..18: mol_type = other DNA
ttgcctacaggggcattt

SEQ ID NO: 32622 - DNA, 18 bp, synthetic construct
  source 1..18: mol_type = other DNA
cttgcctacaggggcatt

SEQ ID NO: 32623 - DNA, 18 bp, synthetic construct
  source 1..18: mol_type = other DNA
gcttgcctacaggggcat

SEQ ID NO: 32624 - DNA, 18 bp, synthetic construct
  source 1..18: mol_type = other DNA
taggcttgcctacagggg

SEQ ID NO: 32625 - DNA, 18 bp, synthetic construct
  source 1..18: mol_type = other DNA
gtaggcttgcctacaggg

SEQ ID NO: 32626 - DNA, 18 bp, synthetic construct
  source 1..18: mol_type = other DNA
tgtaggcttgcctacagg

SEQ ID NO: 32627 - DNA, 18 bp, synthetic construct
  source 1..18: mol_type = other DNA
gtgtaggcttgcctacag

SEQ ID NO: 32628 - DNA, 18 bp, synthetic construct
  source 1..18: mol_type = other DNA
tgtgtaggcttgcctaca

SEQ ID NO: 32629 - DNA, 18 bp, synthetic construct
  source 1..18: mol_type = other DNA
ttgtgtaggcttgcctac

SEQ ID NO: 32630 - DNA, 18 bp, synthetic construct
  source 1..18: mol_type = other DNA
cttgtgtaggcttgccta

SEQ ID NO: 32631 - DNA, 18 bp, synthetic construct
  source 1..18: mol_type = other DNA
acttgtgtaggcttgcct

SEQ ID NO: 32632 - DNA, 18 bp, synthetic construct
  source 1..18: mol_type = other DNA
tacttgtgtaggcttgcc

SEQ ID NO: 32633 - DNA, 18 bp, synthetic construct
  source 1..18: mol_type = other DNA
atacttgtgtaggcttgc

SEQ ID NO: 32634 - DNA, 18 bp, synthetic construct
  source 1..18: mol_type = other DNA
aatacttgtgtaggcttg

SEQ ID NO: 32635 - DNA, 18 bp, synthetic construct
  source 1..18: mol_type = other DNA
taatacttgtgtaggctt

SEQ ID NO: 32636 - DNA, 18 bp, synthetic construct
  source 1..18: mol_type = other DNA
gtaatacttgtgtaggct

SEQ ID NO: 32637 - DNA, 18 bp, synthetic construct
  source 1..18: mol_type = other DNA
tgtaatacttgtgtaggc

SEQ ID NO: 32638 - DNA, 18 bp, synthetic construct
  source 1..18: mol_type = other DNA
gtattgtgacatatctct

SEQ ID NO: 32639 - DNA, 18 bp, synthetic construct
  source 1..18: mol_type = other DNA
ggtattgtgacatatctc

SEQ ID NO: 32640 - DNA, 18 bp, synthetic construct
  source 1..18: mol_type = other DNA
gggtattgtgacatatct

SEQ ID NO: 32641 - DNA, 18 bp, synthetic construct
  source 1..18: mol_type = other DNA
ggggtattgtgacatatc

SEQ ID NO: 32642 - DNA, 18 bp, synthetic construct
  source 1..18: mol_type = other DNA
gggggtattgtgacatat

SEQ ID NO: 32643 - DNA, 18 bp, synthetic construct
  source 1..18: mol_type = other DNA
agggggtattgtgacata

SEQ ID NO: 32644 - DNA, 18 bp, synthetic construct
  source 1..18: mol_type = other DNA
cagggggtattgtgacat

SEQ ID NO: 32645 - DNA, 18 bp, synthetic construct
  source 1..18: mol_type = other DNA
acagggggtattgtgaca

SEQ ID NO: 32646 - DNA, 18 bp, synthetic construct
  source 1..18: mol_type = other DNA
ttacagggggtattgtga

SEQ ID NO: 32647 - DNA, 18 bp, synthetic construct
  source 1..18: mol_type = other DNA
cttacagggggtattgtg

SEQ ID NO: 32648 - DNA, 18 bp, synthetic construct
  source 1..18: mol_type = other DNA
gcttacagggggtattgt

SEQ ID NO: 32649 - DNA, 18 bp, synthetic construct
  source 1..18: mol_type = other DNA
tgcttacagggggtattg

SEQ ID NO: 32650 - DNA, 18 bp, synthetic construct
  source 1..18: mol_type = other DNA
ctgcttacagggggtatt

SEQ ID NO: 32651 - DNA, 18 bp, synthetic construct
  source 1..18: mol_type = other DNA
tctgcttacagggggtat

SEQ ID NO: 32652 - DNA, 18 bp, synthetic construct
  source 1..18: mol_type = other DNA
ctctgcttacagggggta

SEQ ID NO: 32653 - DNA, 18 bp, synthetic construct
  source 1..18: mol_type = other DNA
ggctctgcttacaggggg

SEQ ID NO: 32654 - DNA, 18 bp, synthetic construct
  source 1..18: mol_type = other DNA
aggctctgcttacagggg

SEQ ID NO: 32655 - DNA, 18 bp, synthetic construct
  source 1..18: mol_type = other DNA
taggctctgcttacaggg

SEQ ID NO: 32656 - DNA, 18 bp, synthetic construct
  source 1..18: mol_type = other DNA
ctaggctctgcttacagg

SEQ ID NO: 32657 - DNA, 18 bp, synthetic construct
  source 1..18: mol_type = other DNA
tctaggctctgcttacag

SEQ ID NO: 32658 - DNA, 18 bp, synthetic construct
  source 1..18: mol_type = other DNA
gtctaggctctgcttaca

SEQ ID NO: 32659 - DNA, 18 bp, synthetic construct
  source 1..18: mol_type = other DNA
tgtctaggctctgcttac

SEQ ID NO: 32660 - DNA, 18 bp, synthetic construct
  source 1..18: mol_type = other DNA
ttgtctaggctctgctta

SEQ ID NO: 32661 - DNA, 18 bp, synthetic construct
  source 1..18: mol_type = other DNA
cttgtctaggctctgctt

SEQ ID NO: 32662 - DNA, 18 bp, synthetic construct
  source 1..18: mol_type = other DNA
tcttgtctaggctctgct

SEQ ID NO: 32663 - DNA, 18 bp, synthetic construct
  source 1..18: mol_type = other DNA
gtcacatatctctgcact

SEQ ID NO: 32664 - DNA, 18 bp, synthetic construct
  source 1..18: mol_type = other DNA
tgtcacatatctctgcac

SEQ ID NO: 32665 - DNA, 18 bp, synthetic construct
  source 1..18: mol_type = other DNA
ttgtcacatatctctgca

SEQ ID NO: 32666 - DNA, 18 bp, synthetic construct
  source 1..18: mol_type = other DNA
cttgtcacatatctctgc

SEQ ID NO: 32667 - DNA, 18 bp, synthetic construct
  source 1..18: mol_type = other DNA
ccttgtcacatatctctg

SEQ ID NO: 32668 - DNA, 18 bp, synthetic construct
  source 1..18: mol_type = other DNA
gccttgtcacatatctct

SEQ ID NO: 32669 - DNA, 18 bp, synthetic construct
  source 1..18: mol_type = other DNA
ggccttgtcacatatctc

SEQ ID NO: 32670 - DNA, 18 bp, synthetic construct
  source 1..18: mol_type = other DNA
gggccttgtcacatatct

SEQ ID NO: 32671 - DNA, 18 bp, synthetic construct
  source 1..18: mol_type = other DNA
ggggccttgtcacatatc

SEQ ID NO: 32672 - DNA, 18 bp, synthetic construct
  source 1..18: mol_type = other DNA
aggggccttgtcacatat

SEQ ID NO: 32673 - DNA, 18 bp, synthetic construct
  source 1..18: mol_type = other DNA
aaggggccttgtcacata

SEQ ID NO: 32674 - DNA, 18 bp, synthetic construct
  source 1..18: mol_type = other DNA
attgtctaggctctgctt

SEQ ID NO: 32675 - DNA, 18 bp, synthetic construct
  source 1..18: mol_type = other DNA
tattgtctaggctctgct

SEQ ID NO: 32676 - DNA, 18 bp, synthetic construct
  source 1..18: mol_type = other DNA
ctattgtctaggctctgc

SEQ ID NO: 32677 - DNA, 18 bp, synthetic construct
  source 1..18: mol_type = other DNA
actattgtctaggctctg

SEQ ID NO: 32678 - DNA, 18 bp, synthetic construct
  source 1..18: mol_type = other DNA
aactattgtctaggctct

SEQ ID NO: 32679 - DNA, 18 bp, synthetic construct
  source 1..18: mol_type = other DNA
taactattgtctaggctc

SEQ ID NO: 32680 - DNA, 18 bp, synthetic construct
  source 1..18: mol_type = other DNA
ggtgatgtaactattgtc

SEQ ID NO: 32681 - DNA, 18 bp, synthetic construct
  source 1..18: mol_type = other DNA
ctcaggtgatgtaactat

SEQ ID NO: 32682 - DNA, 18 bp, synthetic construct
  source 1..18: mol_type = other DNA
actcaggtgatgtaacta

SEQ ID NO: 32683 - DNA, 18 bp, synthetic construct
  source 1..18: mol_type = other DNA
cactcaggtgatgtaact

SEQ ID NO: 32684 - DNA, 18 bp, synthetic construct
  source 1..18: mol_type = other DNA
tcactcaggtgatgtaac

SEQ ID NO: 32685 - DNA, 18 bp, synthetic construct
  source 1..18: mol_type = other DNA
atcactcaggtgatgtaa

SEQ ID NO: 32686 - DNA, 18 bp, synthetic construct
  source 1..18: mol_type = other DNA
gatcactcaggtgatgta

SEQ ID NO: 32687 - DNA, 18 bp, synthetic construct
  source 1..18: mol_type = other DNA
tgatcactcaggtgatgt

SEQ ID NO: 32688 - DNA, 18 bp, synthetic construct
  source 1..18: mol_type = other DNA
ctgatcactcaggtgatg

SEQ ID NO: 32689 - DNA, 18 bp, synthetic construct
  source 1..18: mol_type = other DNA
actgatcactcaggtgat

SEQ ID NO: 32690 - DNA, 18 bp, synthetic construct
  source 1..18: mol_type = other DNA
cactgatcactcaggtga

SEQ ID NO: 32691 - DNA, 18 bp, synthetic construct
  source 1..18: mol_type = other DNA
gcactgatcactcaggtg

SEQ ID NO: 32692 - DNA, 18 bp, synthetic construct
  source 1..18: mol_type = other DNA
tgcactgatcactcaggt

SEQ ID NO: 32693 - DNA, 18 bp, synthetic construct
  source 1..18: mol_type = other DNA
ctgcactgatcactcagg

SEQ ID NO: 32694 - DNA, 18 bp, synthetic construct
  source 1..18: mol_type = other DNA
tctgcactgatcactcag

SEQ ID NO: 32695 - DNA, 18 bp, synthetic construct
  source 1..18: mol_type = other DNA
ctctgcactgatcactca

SEQ ID NO: 32696 - DNA, 18 bp, synthetic construct
  source 1..18: mol_type = other DNA
tctctgcactgatcactc

SEQ ID NO: 32697 - DNA, 18 bp, synthetic construct
  source 1..18: mol_type = other DNA
gatctctgcactgatcac

SEQ ID NO: 32698 - DNA, 18 bp, synthetic construct
  source 1..18: mol_type = other DNA
agatctctgcactgatca

SEQ ID NO: 32699 - DNA, 18 bp, synthetic construct
  source 1..18: mol_type = other DNA
cagatctctgcactgatc

SEQ ID NO: 32700 - DNA, 18 bp, synthetic construct
  source 1..18: mol_type = other DNA
acagatctctgcactgat

SEQ ID NO: 32701 - DNA, 18 bp, synthetic construct
  source 1..18: mol_type = other DNA
gacagatctctgcactga

SEQ ID NO: 32702 - DNA, 18 bp, synthetic construct
  source 1..18: mol_type = other DNA
tgacagatctctgcactg

SEQ ID NO: 32703 - DNA, 18 bp, synthetic construct
  source 1..18: mol_type = other DNA
gtgacagatctctgcact

SEQ ID NO: 32704 - DNA, 18 bp, synthetic construct
  source 1..18: mol_type = other DNA
tgtgacagatctctgcac

SEQ ID NO: 32705 - DNA, 18 bp, synthetic construct
  source 1..18: mol_type = other DNA
ttgtgacagatctctgca

SEQ ID NO: 32706 - DNA, 18 bp, synthetic construct
  source 1..18: mol_type = other DNA
attgtgacagatctctgc

SEQ ID NO: 32707 - DNA, 18 bp, synthetic construct
  source 1..18: mol_type = other DNA
cattgtgacagatctctg

SEQ ID NO: 32708 - DNA, 18 bp, synthetic construct
  source 1..18: mol_type = other DNA
aaggggcattgtgacaga

SEQ ID NO: 32709 - DNA, 18 bp, synthetic construct
  source 1..18: mol_type = other DNA
aaaggggcattgtgacag

SEQ ID NO: 32710 - DNA, 18 bp, synthetic construct
  source 1..18: mol_type = other DNA
taaaggggcattgtgaca

SEQ ID NO: 32711 - DNA, 18 bp, synthetic construct
  source 1..18: mol_type = other DNA
ctaaaggggcattgtgac

SEQ ID NO: 32712 - DNA, 18 bp, synthetic construct
  source 1..18: mol_type = other DNA
cctaaaggggcattgtga

SEQ ID NO: 32713 - DNA, 18 bp, synthetic construct
  source 1..18: mol_type = other DNA
gcctaaaggggcattgtg

SEQ ID NO: 32714 - DNA, 18 bp, synthetic construct
  source 1..18: mol_type = other DNA
tgcctaaaggggcattgt

SEQ ID NO: 32715 - DNA, 18 bp, synthetic construct
  source 1..18: mol_type = other DNA
ctgcctaaaggggcattg

SEQ ID NO: 32716 - DNA, 18 bp, synthetic construct
  source 1..18: mol_type = other DNA
tctgcctaaaggggcatt

SEQ ID NO: 32717 - DNA, 18 bp, synthetic construct
  source 1..18: mol_type = other DNA
ctctgcctaaaggggcat

SEQ ID NO: 32718 - DNA, 18 bp, synthetic construct
  source 1..18: mol_type = other DNA
gctctgcctaaaggggca

SEQ ID NO: 32719 - DNA, 18 bp, synthetic construct
  source 1..18: mol_type = other DNA
agctctgcctaaaggggc

SEQ ID NO: 32720 - DNA, 18 bp, synthetic construct
  source 1..18: mol_type = other DNA
aagctctgcctaaagggg

SEQ ID NO: 32721 - DNA, 18 bp, synthetic construct
  source 1..18: mol_type = other DNA
taagctctgcctaaaggg

SEQ ID NO: 32722 - DNA, 18 bp, synthetic construct
  source 1..18: mol_type = other DNA
ttaagctctgcctaaagg

SEQ ID NO: 32723 - DNA, 18 bp, synthetic construct
  source 1..18: mol_type = other DNA
tttaagctctgcctaaag

SEQ ID NO: 32724 - DNA, 18 bp, synthetic construct
  source 1..18: mol_type = other DNA
gtttaagctctgcctaaa

SEQ ID NO: 32725 - DNA, 18 bp, synthetic construct
  source 1..18: mol_type = other DNA
aggtgatgtaactctagt

SEQ ID NO: 32726 - DNA, 18 bp, synthetic construct
  source 1..18: mol_type = other DNA
caggtgatgtaactctag

SEQ ID NO: 32727 - DNA, 18 bp, synthetic construct
  source 1..18: mol_type = other DNA
ctgatcacacaggtgatg

SEQ ID NO: 32728 - DNA, 18 bp, synthetic construct
  source 1..18: mol_type = other DNA
actgatcacacaggtgat

SEQ ID NO: 32729 - DNA, 18 bp, synthetic construct
  source 1..18: mol_type = other DNA
cactgatcacacaggtga

SEQ ID NO: 32730 - DNA, 18 bp, synthetic construct
  source 1..18: mol_type = other DNA
ctaagctctgcctaaagg

SEQ ID NO: 32731 - DNA, 18 bp, synthetic construct
  source 1..18: mol_type = other DNA
tctaagctctgcctaaag

SEQ ID NO: 32732 - DNA, 18 bp, synthetic construct
  source 1..18: mol_type = other DNA
gtctaagctctgcctaaa

SEQ ID NO: 32733 - DNA, 18 bp, synthetic construct
  source 1..18: mol_type = other DNA
agtctaagctctgcctaa

SEQ ID NO: 32734 - DNA, 18 bp, synthetic construct
  source 1..18: mol_type = other DNA
tagtctaagctctgccta

SEQ ID NO: 32735 - DNA, 18 bp, synthetic construct
  source 1..18: mol_type = other DNA
ctagtctaagctctgcct

SEQ ID NO: 32736 - DNA, 18 bp, synthetic construct
  source 1..18: mol_type = other DNA
tctagtctaagctctgcc

SEQ ID NO: 32737 - DNA, 18 bp, synthetic construct
  source 1..18: mol_type = other DNA
ctctagtctaagctctgc

SEQ ID NO: 32738 - DNA, 18 bp, synthetic construct
  source 1..18: mol_type = other DNA
actctagtctaagctctg

SEQ ID NO: 32739 - DNA, 18 bp, synthetic construct
  source 1..18: mol_type = other DNA
aactctagtctaagctct

SEQ ID NO: 32740 - DNA, 18 bp, synthetic construct
  source 1..18: mol_type = other DNA
taactctagtctaagctc

SEQ ID NO: 32741 - DNA, 18 bp, synthetic construct
  source 1..18: mol_type = other DNA
gtaactctagtctaagct

SEQ ID NO: 32742 - DNA, 18 bp, synthetic construct
  source 1..18: mol_type = other DNA
tgtaactctagtctaagc

SEQ ID NO: 32743 - DNA, 18 bp, synthetic construct
  source 1..18: mol_type = other DNA
gtgatgtaactctagtct

SEQ ID NO: 32744 - DNA, 18 bp, synthetic construct
  source 1..18: mol_type = other DNA
ggtgatgtaactctagtc

SEQ ID NO: 32745 - DNA, 18 bp, synthetic construct
  source 1..18: mol_type = other DNA
ccaggtgatgtaactcta

SEQ ID NO: 32746 - DNA, 18 bp, synthetic construct
  source 1..18: mol_type = other DNA
gatttgcctatgggggca

SEQ ID NO: 32747 - DNA, 18 bp, synthetic construct
  source 1..18: mol_type = other DNA
ggatttgcctatgggggc

SEQ ID NO: 32748 - DNA, 18 bp, synthetic construct
  source 1..18: mol_type = other DNA
tggatttgcctatggggg

SEQ ID NO: 32749 - DNA, 18 bp, synthetic construct
  source 1..18: mol_type = other DNA
ttggatttgcctatgggg

SEQ ID NO: 32750 - DNA, 18 bp, synthetic construct
  source 1..18: mol_type = other DNA
cttggatttgcctatggg

SEQ ID NO: 32751 - DNA, 18 bp, synthetic construct
  source 1..18: mol_type = other DNA
tcttggatttgcctatgg

SEQ ID NO: 32752 - DNA, 18 bp, synthetic construct
  source 1..18: mol_type = other DNA
gtcttggatttgcctatg

SEQ ID NO: 32753 - DNA, 18 bp, synthetic construct
  source 1..18: mol_type = other DNA
tgtcttggatttgcctat

SEQ ID NO: 32754 - DNA, 18 bp, synthetic construct
  source 1..18: mol_type = other DNA
ttgtcttggatttgccta

SEQ ID NO: 32755 - DNA, 18 bp, synthetic construct
  source 1..18: mol_type = other DNA
cttgtcttggatttgcct

SEQ ID NO: 32756 - DNA, 18 bp, synthetic construct
  source 1..18: mol_type = other DNA
tcttgtcttggatttgcc

SEQ ID NO: 32757 - DNA, 18 bp, synthetic construct
  source 1..18: mol_type = other DNA
ctcttgtcttggatttgc

SEQ ID NO: 32758 - DNA, 18 bp, synthetic construct
  source 1..18: mol_type = other DNA
actcttgtcttggatttg

SEQ ID NO: 32759 - DNA, 18 bp, synthetic construct
  source 1..18: mol_type = other DNA
gactcttgtcttggattt

SEQ ID NO: 32760 - DNA, 18 bp, synthetic construct
  source 1..18: mol_type = other DNA
agactcttgtcttggatt

SEQ ID NO: 32761 - DNA, 18 bp, synthetic construct
  source 1..18: mol_type = other DNA
cagactcttgtcttggat

SEQ ID NO: 32762 - DNA, 18 bp, synthetic construct
  source 1..18: mol_type = other DNA
acagactcttgtcttgga

SEQ ID NO: 32763 - DNA, 18 bp, synthetic construct
  source 1..18: mol_type = other DNA
attgtgacatatttctgc

SEQ ID NO: 32764 - DNA, 18 bp, synthetic construct
  source 1..18: mol_type = other DNA
gcattgtgacatatttct

SEQ ID NO: 32765 - DNA, 18 bp, synthetic construct
  source 1..18: mol_type = other DNA
ggcattgtgacatatttc

SEQ ID NO: 32766 - DNA, 18 bp, synthetic construct
  source 1..18: mol_type = other DNA
gggcattgtgacatattt

SEQ ID NO: 32767 - DNA, 18 bp, synthetic construct
  source 1..18: mol_type = other DNA
ggggcattgtgacatatt

SEQ ID NO: 32768 - DNA, 18 bp, synthetic construct
  source 1..18: mol_type = other DNA
gttggatctgcctatggg

SEQ ID NO: 32769 - DNA, 18 bp, synthetic construct
  source 1..18: mol_type = other DNA
tgttggatctgcctatgg

SEQ ID NO: 32770 - DNA, 18 bp, synthetic construct
  source 1..18: mol_type = other DNA
gtgttggatctgcctatg

SEQ ID NO: 32771 - DNA, 18 bp, synthetic construct
  source 1..18: mol_type = other DNA
tgtgttggatctgcctat

SEQ ID NO: 32772 - DNA, 18 bp, synthetic construct
  source 1..18: mol_type = other DNA
ttgtgttggatctgccta

SEQ ID NO: 32773 - DNA, 18 bp, synthetic construct
  source 1..18: mol_type = other DNA
cttgtgttggatctgcct

SEQ ID NO: 32774 - DNA, 18 bp, synthetic construct
  source 1..18: mol_type = other DNA
tcttgtgttggatctgcc

SEQ ID NO: 32775 - DNA, 18 bp, synthetic construct
  source 1..18: mol_type = other DNA
ctcttgtgttggatctgc

SEQ ID NO: 32776 - DNA, 18 bp, synthetic construct
  source 1..18: mol_type = other DNA
actcttgtgttggatctg

SEQ ID NO: 32777 - DNA, 18 bp, synthetic construct
  source 1..18: mol_type = other DNA
aactcttgtgttggatct

SEQ ID NO: 32778 - DNA, 18 bp, synthetic construct
  source 1..18: mol_type = other DNA
taactcttgtgttggatc

SEQ ID NO: 32779 - DNA, 18 bp, synthetic construct
  source 1..18: mol_type = other DNA
gtaactcttgtgttggat

SEQ ID NO: 32780 - DNA, 18 bp, synthetic construct
  source 1..18: mol_type = other DNA
tgtaactcttgtgttgga

SEQ ID NO: 32781 - DNA, 18 bp, synthetic construct
  source 1..18: mol_type = other DNA
atgtaactcttgtgttgg

SEQ ID NO: 32782 - DNA, 18 bp, synthetic construct
  source 1..18: mol_type = other DNA
gatgtaactcttgtgttg

SEQ ID NO: 32783 - DNA, 18 bp, synthetic construct
  source 1..18: mol_type = other DNA
tgatgtaactcttgtgtt

SEQ ID NO: 32784 - DNA, 18 bp, synthetic construct
  source 1..18: mol_type = other DNA
gtgatgtaactcttgtgt

SEQ ID NO: 32785 - DNA, 18 bp, synthetic construct
  source 1..18: mol_type = other DNA
ggtgatgtaactcttgtg

SEQ ID NO: 32786 - DNA, 18 bp, synthetic construct
  source 1..18: mol_type = other DNA
ttacatatctctgcactg

SEQ ID NO: 32787 - DNA, 18 bp, synthetic construct
  source 1..18: mol_type = other DNA
gatcacacaggtgatgga

SEQ ID NO: 32788 - DNA, 18 bp, synthetic construct
  source 1..18: mol_type = other DNA
tgatcacacaggtgatgg

SEQ ID NO: 32789 - DNA, 18 bp, synthetic construct
  source 1..18: mol_type = other DNA
acactgatcacacaggtg

SEQ ID NO: 32790 - DNA, 18 bp, synthetic construct
  source 1..18: mol_type = other DNA
tacactgatcacacaggt

SEQ ID NO: 32791 - DNA, 18 bp, synthetic construct
  source 1..18: mol_type = other DNA
ctacactgatcacacagg

SEQ ID NO: 32792 - DNA, 18 bp, synthetic construct
  source 1..18: mol_type = other DNA
tctacactgatcacacag

SEQ ID NO: 32793 - DNA, 18 bp, synthetic construct
  source 1..18: mol_type = other DNA
ctctacactgatcacaca

SEQ ID NO: 32794 - DNA, 18 bp, synthetic construct
  source 1..18: mol_type = other DNA
tctctacactgatcacac

SEQ ID NO: 32795 - DNA, 18 bp, synthetic construct
  source 1..18: mol_type = other DNA
atctctacactgatcaca

SEQ ID NO: 32796 - DNA, 18 bp, synthetic construct
  source 1..18: mol_type = other DNA
aggcattgtgacatatct

SEQ ID NO: 32797 - DNA, 18 bp, synthetic construct
  source 1..18: mol_type = other DNA
gaggcattgtgacatatc

SEQ ID NO: 32798 - DNA, 18 bp, synthetic construct
  source 1..18: mol_type = other DNA
ggaggcattgtgacatat

SEQ ID NO: 32799 - DNA, 18 bp, synthetic construct
  source 1..18: mol_type = other DNA
aggaggcattgtgacata

SEQ ID NO: 32800 - DNA, 18 bp, synthetic construct
  source 1..18: mol_type = other DNA
caggaggcattgtgacat

SEQ ID NO: 32801 - DNA, 18 bp, synthetic construct
  source 1..18: mol_type = other DNA
acaggaggcattgtgaca

SEQ ID NO: 32802 - DNA, 18 bp, synthetic construct
  source 1..18: mol_type = other DNA
tacaggaggcattgtgac

SEQ ID NO: 32803 - DNA, 18 bp, synthetic construct
  source 1..18: mol_type = other DNA
ctacaggaggcattgtga

SEQ ID NO: 32804 - DNA, 18 bp, synthetic construct
  source 1..18: mol_type = other DNA
cctacaggaggcattgtg

SEQ ID NO: 32805 - DNA, 18 bp, synthetic construct
  source 1..18: mol_type = other DNA
gcctacaggaggcattgt

SEQ ID NO: 32806 - DNA, 18 bp, synthetic construct
  source 1..18: mol_type = other DNA
tgcctacaggaggcattg

SEQ ID NO: 32807 - DNA, 18 bp, synthetic construct
  source 1..18: mol_type = other DNA
ctgcctacaggaggcatt

SEQ ID NO: 32808 - DNA, 18 bp, synthetic construct
  source 1..18: mol_type = other DNA
tctgcctacaggaggcat

SEQ ID NO: 32809 - DNA, 18 bp, synthetic construct
  source 1..18: mol_type = other DNA
ctctgcctacaggaggca

SEQ ID NO: 32810 - DNA, 18 bp, synthetic construct
  source 1..18: mol_type = other DNA
agcctctgcctacaggag

SEQ ID NO: 32811 - DNA, 18 bp, synthetic construct
  source 1..18: mol_type = other DNA
tagcctctgcctacagga

SEQ ID NO: 32812 - DNA, 18 bp, synthetic construct
  source 1..18: mol_type = other DNA
ttagcctctgcctacagg

SEQ ID NO: 32813 - DNA, 18 bp, synthetic construct
  source 1..18: mol_type = other DNA
tttagcctctgcctacag

SEQ ID NO: 32814 - DNA, 18 bp, synthetic construct
  source 1..18: mol_type = other DNA
gtttagcctctgcctaca

SEQ ID NO: 32815 - DNA, 18 bp, synthetic construct
  source 1..18: mol_type = other DNA
tgtttagcctctgcctac

SEQ ID NO: 32816 - DNA, 18 bp, synthetic construct
  source 1..18: mol_type = other DNA
ttgtttagcctctgccta

SEQ ID NO: 32817 - DNA, 18 bp, synthetic construct
  source 1..18: mol_type = other DNA
cttgtttagcctctgcct

SEQ ID NO: 32818 - DNA, 18 bp, synthetic construct
  source 1..18: mol_type = other DNA
tcttgtttagcctctgcc

SEQ ID NO: 32819 - DNA, 18 bp, synthetic construct
  source 1..18: mol_type = other DNA
ctcttgtttagcctctgc

SEQ ID NO: 32820 - DNA, 18 bp, synthetic construct
  source 1..18: mol_type = other DNA
actcttgtttagcctctg

SEQ ID NO: 32821 - DNA, 18 bp, synthetic construct
  source 1..18: mol_type = other DNA
aactcttgtttagcctct

SEQ ID NO: 32822 - DNA, 18 bp, synthetic construct
  source 1..18: mol_type = other DNA
taactcttgtttagcctc

SEQ ID NO: 32823 - DNA, 18 bp, synthetic construct
  source 1..18: mol_type = other DNA
gtaactcttgtttagcct

SEQ ID NO: 32824 - DNA, 18 bp, synthetic construct
  source 1..18: mol_type = other DNA
tgtaactcttgtttagcc

SEQ ID NO: 32825 - DNA, 18 bp, synthetic construct
  source 1..18: mol_type = other DNA
atgtaactcttgtttagc

SEQ ID NO: 32826 - DNA, 18 bp, synthetic construct
  source 1..18: mol_type = other DNA
gtgatgtaactcttgttt

SEQ ID NO: 32827 - DNA, 18 bp, synthetic construct
  source 1..18: mol_type = other DNA
ggtgatgtaactcttgtt

SEQ ID NO: 32828 - DNA, 18 bp, synthetic construct
  source 1..18: mol_type = other DNA
tccaggtgatgtaactct

SEQ ID NO: 32829 - DNA, 18 bp, synthetic construct
  source 1..18: mol_type = other DNA
atccaggtgatgtaactc

SEQ ID NO: 32830 - DNA, 18 bp, synthetic construct
  source 1..18: mol_type = other DNA
aatccaggtgatgtaact

SEQ ID NO: 32831 - DNA, 18 bp, synthetic construct
  source 1..18: mol_type = other DNA
tgtgacatattgcaggaa

SEQ ID NO: 32832 - DNA, 18 bp, synthetic construct
  source 1..18: mol_type = other DNA
ttgtgacatattgcagga

SEQ ID NO: 32833 - DNA, 18 bp, synthetic construct
  source 1..18: mol_type = other DNA
attgtgacatattgcagg

SEQ ID NO: 32834 - DNA, 18 bp, synthetic construct
  source 1..18: mol_type = other DNA
cattgtgacatattgcag

SEQ ID NO: 32835 - DNA, 18 bp, synthetic construct
  source 1..18: mol_type = other DNA
ccattgtgacatattgca

SEQ ID NO: 32836 - DNA, 18 bp, synthetic construct
  source 1..18: mol_type = other DNA
gccattgtgacatattgc

SEQ ID NO: 32837 - DNA, 18 bp, synthetic construct
  source 1..18: mol_type = other DNA
gcctaagcctaaccccta

SEQ ID NO: 32838 - DNA, 18 bp, synthetic construct
  source 1..18: mol_type = other DNA
agcctaagcctaacccct

SEQ ID NO: 32839 - DNA, 18 bp, synthetic construct
  source 1..18: mol_type = other DNA
aagcctaagcctaacccc

SEQ ID NO: 32840 - DNA, 18 bp, synthetic construct
  source 1..18: mol_type = other DNA
taagcctaagcctaaccc

SEQ ID NO: 32841 - DNA, 18 bp, synthetic construct
  source 1..18: mol_type = other DNA
ctaagcctaagcctaacc

SEQ ID NO: 32842 - DNA, 18 bp, synthetic construct
  source 1..18: mol_type = other DNA
cctaagcctaagcctaac

SEQ ID NO: 32843 - DNA, 18 bp, synthetic construct
  source 1..18: mol_type = other DNA
ccctaagcctaagcctaa

SEQ ID NO: 32844 - DNA, 18 bp, synthetic construct
  source 1..18: mol_type = other DNA
accctaagcctaagccta

SEQ ID NO: 32845 - DNA, 18 bp, synthetic construct
  source 1..18: mol_type = other DNA
aaccctaagcctaagcct

SEQ ID NO: 32846 - DNA, 18 bp, synthetic construct
  source 1..18: mol_type = other DNA
taaccctaagcctaagcc

SEQ ID NO: 32847 - DNA, 18 bp, synthetic construct
  source 1..18: mol_type = other DNA
ctaaccctaagcctaagc

SEQ ID NO: 32848 - DNA, 18 bp, synthetic construct
  source 1..18: mol_type = other DNA
cctaaccctaagcctaag

SEQ ID NO: 32849 - DNA, 18 bp, synthetic construct
  source 1..18: mol_type = other DNA
gcctaaccctaagcctaa

SEQ ID NO: 32850 - DNA, 18 bp, synthetic construct
  source 1..18: mol_type = other DNA
agcctaaccctaagccta

SEQ ID NO: 32851 - DNA, 18 bp, synthetic construct
  source 1..18: mol_type = other DNA
aagcctaaccctaagcct

SEQ ID NO: 32852 - DNA, 18 bp, synthetic construct
  source 1..18: mol_type = other DNA
taagcctaaccctaagcc

SEQ ID NO: 32853 - DNA, 18 bp, synthetic construct
  source 1..18: mol_type = other DNA
ctaagcctaaccctaagc

SEQ ID NO: 32854 - DNA, 18 bp, synthetic construct
  source 1..18: mol_type = other DNA
cctaagcctaaccctaag

SEQ ID NO: 32855 - DNA, 18 bp, synthetic construct
  source 1..18: mol_type = other DNA
gcctaagcctaaccctaa

SEQ ID NO: 32856 - DNA, 18 bp, synthetic construct
  source 1..18: mol_type = other DNA
agcctaagcctaacccta

SEQ ID NO: 32857 - DNA, 18 bp, synthetic construct
  source 1..18: mol_type = other DNA
aagcctaagcctaaccct

SEQ ID NO: 32858 - DNA, 18 bp, synthetic construct
  source 1..18: mol_type = other DNA
taccctaagcctaagcct

SEQ ID NO: 32859 - DNA, 18 bp, synthetic construct
  source 1..18: mol_type = other DNA
ttaccctaagcctaagcc

SEQ ID NO: 32860 - DNA, 18 bp, synthetic construct
  source 1..18: mol_type = other DNA
cttaccctaagcctaagc

SEQ ID NO: 32861 - DNA, 18 bp, synthetic construct
  source 1..18: mol_type = other DNA
ccttaccctaagcctaag

SEQ ID NO: 32862 - DNA, 18 bp, synthetic construct
  source 1..18: mol_type = other DNA
gccttaccctaagcctaa

SEQ ID NO: 32863 - DNA, 18 bp, synthetic construct
  source 1..18: mol_type = other DNA
agccttaccctaagccta

SEQ ID NO: 32864 - DNA, 18 bp, synthetic construct
  source 1..18: mol_type = other DNA
aagccttaccctaagcct

SEQ ID NO: 32865 - DNA, 18 bp, synthetic construct
  source 1..18: mol_type = other DNA
taagccttaccctaagcc

SEQ ID NO: 32866 - DNA, 18 bp, synthetic construct
  source 1..18: mol_type = other DNA
ctaagccttaccctaagc

SEQ ID NO: 32867 - DNA, 18 bp, synthetic construct
  source 1..18: mol_type = other DNA
cctaagccttaccctaag

SEQ ID NO: 32868 - DNA, 18 bp, synthetic construct
  source 1..18: mol_type = other DNA
ccctaagccttaccctaa

SEQ ID NO: 32869 - DNA, 18 bp, synthetic construct
  source 1..18: mol_type = other DNA
accctaagccttacccta

SEQ ID NO: 32870 - DNA, 18 bp, synthetic construct
  source 1..18: mol_type = other DNA
aaccctaagccttaccct

SEQ ID NO: 32871 - DNA, 18 bp, synthetic construct
  source 1..18: mol_type = other DNA
gaaccctaagccttaccc

SEQ ID NO: 32872 - DNA, 18 bp, synthetic construct
  source 1..18: mol_type = other DNA
tgaaccctaagccttacc

SEQ ID NO: 32873 - DNA, 18 bp, synthetic construct
  source 1..18: mol_type = other DNA
ctgaaccctaagccttac

SEQ ID NO: 32874 - DNA, 18 bp, synthetic construct
  source 1..18: mol_type = other DNA
cctgaaccctaagcctta

SEQ ID NO: 32875 - DNA, 18 bp, synthetic construct
  source 1..18: mol_type = other DNA
catgtcttaatagcctat

SEQ ID NO: 32876 - DNA, 18 bp, synthetic construct
  source 1..18: mol_type = other DNA
acatgtcttaatagccta

SEQ ID NO: 32877 - DNA, 18 bp, synthetic construct
  source 1..18: mol_type = other DNA
aacatgtcttaatagcct

SEQ ID NO: 32878 - DNA, 18 bp, synthetic construct
  source 1..18: mol_type = other DNA
gccattctttgaagacaa

SEQ ID NO: 32879 - DNA, 18 bp, synthetic construct
  source 1..18: mol_type = other DNA
ggccattctttgaagaca

SEQ ID NO: 32880 - DNA, 18 bp, synthetic construct
  source 1..18: mol_type = other DNA
aggccattctttgaagac

SEQ ID NO: 32881 - DNA, 18 bp, synthetic construct
  source 1..18: mol_type = other DNA
aaggccattctttgaaga

SEQ ID NO: 32882 - DNA, 18 bp, synthetic construct
  source 1..18: mol_type = other DNA
caaggccattctttgaag

SEQ ID NO: 32883 - DNA, 18 bp, synthetic construct
  source 1..18: mol_type = other DNA
ccaaggccattctttgaa

SEQ ID NO: 32884 - DNA, 18 bp, synthetic construct
  source 1..18: mol_type = other DNA
accaaggccattctttga

SEQ ID NO: 32885 - DNA, 18 bp, synthetic construct
  source 1..18: mol_type = other DNA
aaccaaggccattctttg

SEQ ID NO: 32886 - DNA, 18 bp, synthetic construct
  source 1..18: mol_type = other DNA
aaaccaaggccattcttt

SEQ ID NO: 32887 - DNA, 18 bp, synthetic construct
  source 1..18: mol_type = other DNA
gaaaccaaggccattctt

SEQ ID NO: 32888 - DNA, 18 bp, synthetic construct
  source 1..18: mol_type = other DNA
agaaaccaaggccattct

SEQ ID NO: 32889 - DNA, 18 bp, synthetic construct
  source 1..18: mol_type = other DNA
cagaaaccaaggccattc

SEQ ID NO: 32890 - DNA, 18 bp, synthetic construct
  source 1..18: mol_type = other DNA
acagaaaccaaggccatt

SEQ ID NO: 32891 - DNA, 18 bp, synthetic construct
  source 1..18: mol_type = other DNA
cacagaaaccaaggccat

SEQ ID NO: 32892 - DNA, 18 bp, synthetic construct
  source 1..18: mol_type = other DNA
ccacagaaaccaaggcca

SEQ ID NO: 32893 - DNA, 18 bp, synthetic construct
  source 1..18: mol_type = other DNA
tccacagaaaccaaggcc

SEQ ID NO: 32894 - DNA, 18 bp, synthetic construct
  source 1..18: mol_type = other DNA
gtccacagaaaccaaggc

SEQ ID NO: 32895 - DNA, 18 bp, synthetic construct
  source 1..18: mol_type = other DNA
tgtccacagaaaccaagg

SEQ ID NO: 32896 - DNA, 18 bp, synthetic construct
  source 1..18: mol_type = other DNA
ctgtccacagaaaccaag

SEQ ID NO: 32897 - DNA, 18 bp, synthetic construct
  source 1..18: mol_type = other DNA
actgtccacagaaaccaa

SEQ ID NO: 32898 - DNA, 18 bp, synthetic construct
  source 1..18: mol_type = other DNA
aactgtccacagaaacca

SEQ ID NO: 32899 - DNA, 18 bp, synthetic construct
  source 1..18: mol_type = other DNA
ggagaaactgtccacaga

SEQ ID NO: 32900 - DNA, 18 bp, synthetic construct
  source 1..18: mol_type = other DNA
aggagaaactgtccacag

SEQ ID NO: 32901 - DNA, 18 bp, synthetic construct
  source 1..18: mol_type = other DNA
gaggagaaactgtccaca

SEQ ID NO: 32902 - DNA, 18 bp, synthetic construct
  source 1..18: mol_type = other DNA
tgaggagaaactgtccac

SEQ ID NO: 32903 - DNA, 18 bp, synthetic construct
  source 1..18: mol_type = other DNA
atgaggagaaactgtcca

SEQ ID NO: 32904 - DNA, 18 bp, synthetic construct
  source 1..18: mol_type = other DNA
catgaggagaaactgtcc

SEQ ID NO: 32905 - DNA, 18 bp, synthetic construct
  source 1..18: mol_type = other DNA
ccatgaggagaaactgtc

SEQ ID NO: 32906 - DNA, 18 bp, synthetic construct
  source 1..18: mol_type = other DNA
tccatgaggagaaactgt

SEQ ID NO: 32907 - DNA, 18 bp, synthetic construct
  source 1..18: mol_type = other DNA
tttccatgaggagaaact

SEQ ID NO: 32908 - DNA, 18 bp, synthetic construct
  source 1..18: mol_type = other DNA
ctttccatgaggagaaac

SEQ ID NO: 32909 - DNA, 18 bp, synthetic construct
  source 1..18: mol_type = other DNA
cctttccatgaggagaaa

SEQ ID NO: 32910 - DNA, 18 bp, synthetic construct
  source 1..18: mol_type = other DNA
acctttccatgaggagaa

SEQ ID NO: 32911 - DNA, 18 bp, synthetic construct
  source 1..18: mol_type = other DNA
tacctttccatgaggaga

SEQ ID NO: 32912 - DNA, 18 bp, synthetic construct
  source 1..18: mol_type = other DNA
ctacctttccatgaggag

SEQ ID NO: 32913 - DNA, 18 bp, synthetic construct
  source 1..18: mol_type = other DNA
actacctttccatgagga

SEQ ID NO: 32914 - DNA, 18 bp, synthetic construct
  source 1..18: mol_type = other DNA
cactacctttccatgagg

SEQ ID NO: 32915 - DNA, 18 bp, synthetic construct
  source 1..18: mol_type = other DNA
acactacctttccatgag

SEQ ID NO: 32916 - DNA, 18 bp, synthetic construct
  source 1..18: mol_type = other DNA
cacactacctttccatga

SEQ ID NO: 32917 - DNA, 18 bp, synthetic construct
  source 1..18: mol_type = other DNA
acacactacctttccatg

SEQ ID NO: 32918 - DNA, 18 bp, synthetic construct
  source 1..18: mol_type = other DNA
aacacactacctttccat

SEQ ID NO: 32919 - DNA, 18 bp, synthetic construct
  source 1..18: mol_type = other DNA
gaacacactacctttcca

SEQ ID NO: 32920 - DNA, 18 bp, synthetic construct
  source 1..18: mol_type = other DNA
ggaacacactacctttcc

SEQ ID NO: 32921 - DNA, 18 bp, synthetic construct
  source 1..18: mol_type = other DNA
aggaacacactacctttc

SEQ ID NO: 32922 - DNA, 18 bp, synthetic construct
  source 1..18: mol_type = other DNA
caggaacacactaccttt

SEQ ID NO: 32923 - DNA, 18 bp, synthetic construct
  source 1..18: mol_type = other DNA
gcaggaacacactacctt

SEQ ID NO: 32924 - DNA, 18 bp, synthetic construct
  source 1..18: mol_type = other DNA
agcaggaacacactacct

SEQ ID NO: 32925 - DNA, 18 bp, synthetic construct
  source 1..18: mol_type = other DNA
tagcaggaacacactacc

SEQ ID NO: 32926 - DNA, 18 bp, synthetic construct
  source 1..18: mol_type = other DNA
gttgtgtgtgtaatgaga

SEQ ID NO: 32927 - DNA, 18 bp, synthetic construct
  source 1..18: mol_type = other DNA
tgttgtgtgtgtaatgag

SEQ ID NO: 32928 - DNA, 18 bp, synthetic construct
  source 1..18: mol_type = other DNA
ttgttgtgtgtgtaatga

SEQ ID NO: 32929 - DNA, 18 bp, synthetic construct
  source 1..18: mol_type = other DNA
ttttgttgtgtgtgtaat

SEQ ID NO: 32930 - DNA, 18 bp, synthetic construct
  source 1..18: mol_type = other DNA
attttgttgtgtgtgtaa

SEQ ID NO: 32931 - DNA, 18 bp, synthetic construct
  source 1..18: mol_type = other DNA
aattttgttgtgtgtgta

SEQ ID NO: 32932 - DNA, 18 bp, synthetic construct
  source 1..18: mol_type = other DNA
cctcagctaaattttgtt

SEQ ID NO: 32933 - DNA, 18 bp, synthetic construct
  source 1..18: mol_type = other DNA
ccctcagctaaattttgt

SEQ ID NO: 32934 - DNA, 18 bp, synthetic construct
  source 1..18: mol_type = other DNA
tccctcagctaaattttg

SEQ ID NO: 32935 - DNA, 18 bp, synthetic construct
  source 1..18: mol_type = other DNA
ctccctcagctaaatttt

SEQ ID NO: 32936 - DNA, 18 bp, synthetic construct
  source 1..18: mol_type = other DNA
tctccctcagctaaattt

SEQ ID NO: 32937 - DNA, 18 bp, synthetic construct
  source 1..18: mol_type = other DNA
atctccctcagctaaatt

SEQ ID NO: 32938 - DNA, 18 bp, synthetic construct
  source 1..18: mol_type = other DNA
aatctccctcagctaaat

SEQ ID NO: 32939 - DNA, 18 bp, synthetic construct
  source 1..18: mol_type = other DNA
caatctccctcagctaaa

SEQ ID NO: 32940 - DNA, 18 bp, synthetic construct
  source 1..18: mol_type = other DNA
tcaatctccctcagctaa

SEQ ID NO: 32941 - DNA, 18 bp, synthetic construct
  source 1..18: mol_type = other DNA
ctcaatctccctcagcta

SEQ ID NO: 32942 - DNA, 18 bp, synthetic construct
  source 1..18: mol_type = other DNA
actcaatctccctcagct

SEQ ID NO: 32943 - DNA, 18 bp, synthetic construct
  source 1..18: mol_type = other DNA
cactcaatctccctcagc

SEQ ID NO: 32944 - DNA, 18 bp, synthetic construct
  source 1..18: mol_type = other DNA
tcactcaatctccctcag

SEQ ID NO: 32945 - DNA, 18 bp, synthetic construct
  source 1..18: mol_type = other DNA
gtcactcaatctccctca

SEQ ID NO: 32946 - DNA, 18 bp, synthetic construct
  source 1..18: mol_type = other DNA
agtcactcaatctccctc

SEQ ID NO: 32947 - DNA, 18 bp, synthetic construct
  source 1..18: mol_type = other DNA
aagtcactcaatctccct

SEQ ID NO: 32948 - DNA, 18 bp, synthetic construct
  source 1..18: mol_type = other DNA
aaagtcactcaatctccc

SEQ ID NO: 32949 - DNA, 18 bp, synthetic construct
  source 1..18: mol_type = other DNA
gaaagtcactcaatctcc

SEQ ID NO: 32950 - DNA, 18 bp, synthetic construct
  source 1..18: mol_type = other DNA
ggaaagtcactcaatctc

SEQ ID NO: 32951 - DNA, 18 bp, synthetic construct
  source 1..18: mol_type = other DNA
gggaaagtcactcaatct

SEQ ID NO: 32952 - DNA, 18 bp, synthetic construct
  source 1..18: mol_type = other DNA
tgggaaagtcactcaatc

SEQ ID NO: 32953 - DNA, 18 bp, synthetic construct
  source 1..18: mol_type = other DNA
ctgggaaagtcactcaat

SEQ ID NO: 32954 - DNA, 18 bp, synthetic construct
  source 1..18: mol_type = other DNA
cctgggaaagtcactcaa

SEQ ID NO: 32955 - DNA, 18 bp, synthetic construct
  source 1..18: mol_type = other DNA
ccctgggaaagtcactca

SEQ ID NO: 32956 - DNA, 18 bp, synthetic construct
  source 1..18: mol_type = other DNA
accctgggaaagtcactc

SEQ ID NO: 32957 - DNA, 18 bp, synthetic construct
  source 1..18: mol_type = other DNA
gaccctgggaaagtcact

SEQ ID NO: 32958 - DNA, 18 bp, synthetic construct
  source 1..18: mol_type = other DNA
tgaccctgggaaagtcac

SEQ ID NO: 32959 - DNA, 18 bp, synthetic construct
  source 1..18: mol_type = other DNA
gtgaccctgggaaagtca

SEQ ID NO: 32960 - DNA, 18 bp, synthetic construct
  source 1..18: mol_type = other DNA
tgtgaccctgggaaagtc

SEQ ID NO: 32961 - DNA, 18 bp, synthetic construct
  source 1..18: mol_type = other DNA
gtgtgaccctgggaaagt

SEQ ID NO: 32962 - DNA, 18 bp, synthetic construct
  source 1..18: mol_type = other DNA
tgtgtgaccctgggaaag

SEQ ID NO: 32963 - DNA, 18 bp, synthetic construct
  source 1..18: mol_type = other DNA
ctgtgtgaccctgggaaa

SEQ ID NO: 32964 - DNA, 18 bp, synthetic construct
  source 1..18: mol_type = other DNA
gctgtgtgaccctgggaa

SEQ ID NO: 32965 - DNA, 18 bp, synthetic construct
  source 1..18: mol_type = other DNA
agctgtgtgaccctggga

SEQ ID NO: 32966 - DNA, 18 bp, synthetic construct
  source 1..18: mol_type = other DNA
tagctgtgtgaccctggg

SEQ ID NO: 32967 - DNA, 18 bp, synthetic construct
  source 1..18: mol_type = other DNA
gtagctgtgtgaccctgg

SEQ ID NO: 32968 - DNA, 18 bp, synthetic construct
  source 1..18: mol_type = other DNA
agtagctgtgtgaccctg

SEQ ID NO: 32969 - DNA, 18 bp, synthetic construct
  source 1..18: mol_type = other DNA
tagtagctgtgtgaccct

SEQ ID NO: 32970 - DNA, 18 bp, synthetic construct
  source 1..18: mol_type = other DNA
ttagtagctgtgtgaccc

SEQ ID NO: 32971 - DNA, 18 bp, synthetic construct
  source 1..18: mol_type = other DNA
attagtagctgtgtgacc

SEQ ID NO: 32972 - DNA, 18 bp, synthetic construct
  source 1..18: mol_type = other DNA
tattagtagctgtgtgac

SEQ ID NO: 32973 - DNA, 18 bp, synthetic construct
  source 1..18: mol_type = other DNA
ctattagtagctgtgtga

SEQ ID NO: 32974 - DNA, 18 bp, synthetic construct
  source 1..18: mol_type = other DNA
gctattagtagctgtgtg

SEQ ID NO: 32975 - DNA, 18 bp, synthetic construct
  source 1..18: mol_type = other DNA
tgctattagtagctgtgt

SEQ ID NO: 32976 - DNA, 18 bp, synthetic construct
  source 1..18: mol_type = other DNA
ctgctattagtagctgtg

SEQ ID NO: 32977 - DNA, 18 bp, synthetic construct
  source 1..18: mol_type = other DNA
tctgctattagtagctgt

SEQ ID NO: 32978 - DNA, 18 bp, synthetic construct
  source 1..18: mol_type = other DNA
ctctgctattagtagctg

SEQ ID NO: 32979 - DNA, 18 bp, synthetic construct
  source 1..18: mol_type = other DNA
actctgctattagtagct

SEQ ID NO: 32980 - DNA, 18 bp, synthetic construct
  source 1..18: mol_type = other DNA
tactctgctattagtagc

SEQ ID NO: 32981 - DNA, 18 bp, synthetic construct
  source 1..18: mol_type = other DNA
ctactctgctattagtag

SEQ ID NO: 32982 - DNA, 18 bp, synthetic construct
  source 1..18: mol_type = other DNA
actactctgctattagta

SEQ ID NO: 32983 - DNA, 18 bp, synthetic construct
  source 1..18: mol_type = other DNA
cactactctgctattagt

SEQ ID NO: 32984 - DNA, 18 bp, synthetic construct
  source 1..18: mol_type = other DNA
acactactctgctattag

SEQ ID NO: 32985 - DNA, 18 bp, synthetic construct
  source 1..18: mol_type = other DNA
tctaaacactactctgct

SEQ ID NO: 32986 - DNA, 18 bp, synthetic construct
  source 1..18: mol_type = other DNA
gtattcccatatgaatct

SEQ ID NO: 32987 - DNA, 18 bp, synthetic construct
  source 1..18: mol_type = other DNA
agtattcccatatgaatc

SEQ ID NO: 32988 - DNA, 18 bp, synthetic construct
  source 1..18: mol_type = other DNA
cagtattcccatatgaat

SEQ ID NO: 32989 - DNA, 18 bp, synthetic construct
  source 1..18: mol_type = other DNA
tcagtattcccatatgaa

SEQ ID NO: 32990 - DNA, 18 bp, synthetic construct
  source 1..18: mol_type = other DNA
ttcagtattcccatatga

SEQ ID NO: 32991 - DNA, 18 bp, synthetic construct
  source 1..18: mol_type = other DNA
gttcagtattcccatatg

SEQ ID NO: 32992 - DNA, 18 bp, synthetic construct
  source 1..18: mol_type = other DNA
tgttcagtattcccatat

SEQ ID NO: 32993 - DNA, 18 bp, synthetic construct
  source 1..18: mol_type = other DNA
gtgttcagtattcccata

SEQ ID NO: 32994 - DNA, 18 bp, synthetic construct
  source 1..18: mol_type = other DNA
tgtgttcagtattcccat

SEQ ID NO: 32995 - DNA, 18 bp, synthetic construct
  source 1..18: mol_type = other DNA
ctgtgttcagtattccca

SEQ ID NO: 32996 - DNA, 18 bp, synthetic construct
  source 1..18: mol_type = other DNA
tctgtgttcagtattccc

SEQ ID NO: 32997 - DNA, 18 bp, synthetic construct
  source 1..18: mol_type = other DNA
ttctgtgttcagtattcc

SEQ ID NO: 32998 - DNA, 18 bp, synthetic construct
  source 1..18: mol_type = other DNA
tttctgtgttcagtattc

SEQ ID NO: 32999 - DNA, 18 bp, synthetic construct
  source 1..18: mol_type = other DNA
atttctgtgttcagtatt

SEQ ID NO: 33000 - DNA, 18 bp, synthetic construct
  source 1..18: mol_type = other DNA
catttctgtgttcagtat

SEQ ID NO: 33001 - DNA, 18 bp, synthetic construct
  source 1..18: mol_type = other DNA
tcatttctgtgttcagta

SEQ ID NO: 33002 - DNA, 18 bp, synthetic construct
  source 1..18: mol_type = other DNA
ttcatttctgtgttcagt

SEQ ID NO: 33003 - DNA, 18 bp, synthetic construct
  source 1..18: mol_type = other DNA
gttcatttctgtgttcag

SEQ ID NO: 33004 - DNA, 18 bp, synthetic construct
  source 1..18: mol_type = other DNA
ggttcatttctgtgttca

SEQ ID NO: 33005 - DNA, 18 bp, synthetic construct
  source 1..18: mol_type = other DNA
tggttcatttctgtgttc

SEQ ID NO: 33006 - DNA, 18 bp, synthetic construct
  source 1..18: mol_type = other DNA
ttggttcatttctgtgtt

SEQ ID NO: 33007 - DNA, 18 bp, synthetic construct
  source 1..18: mol_type = other DNA
attggttcatttctgtgt

SEQ ID NO: 33008 - DNA, 18 bp, synthetic construct
  source 1..18: mol_type = other DNA
cattggttcatttctgtg

SEQ ID NO: 33009 - DNA, 18 bp, synthetic construct
  source 1..18: mol_type = other DNA
ccattggttcatttctgt

SEQ ID NO: 33010 - DNA, 18 bp, synthetic construct
  source 1..18: mol_type = other DNA
tccattggttcatttctg

SEQ ID NO: 33011 - DNA, 18 bp, synthetic construct
  source 1..18: mol_type = other DNA
ttccattggttcatttct

SEQ ID NO: 33012 - DNA, 18 bp, synthetic construct
  source 1..18: mol_type = other DNA
tttccattggttcatttc

SEQ ID NO: 33013 - DNA, 18 bp, synthetic construct
  source 1..18: mol_type = other DNA
gtttccattggttcattt

SEQ ID NO: 33014 - DNA, 18 bp, synthetic construct
  source 1..18: mol_type = other DNA
tgtttccattggttcatt

SEQ ID NO: 33015 - DNA, 18 bp, synthetic construct
  source 1..18: mol_type = other DNA
atgtttccattggttcat

SEQ ID NO: 33016 - DNA, 18 bp, synthetic construct
  source 1..18: mol_type = other DNA
gatgtttccattggttca

SEQ ID NO: 33017 - DNA, 18 bp, synthetic construct
  source 1..18: mol_type = other DNA
ggatgtttccattggttc

SEQ ID NO: 33018 - DNA, 18 bp, synthetic construct
  source 1..18: mol_type = other DNA
aggatgtttccattggtt

SEQ ID NO: 33019 - DNA, 18 bp, synthetic construct
  source 1..18: mol_type = other DNA
taggatgtttccattggt

SEQ ID NO: 33020 - DNA, 18 bp, synthetic construct
  source 1..18: mol_type = other DNA
gtaggatgtttccattgg

SEQ ID NO: 33021 - DNA, 18 bp, synthetic construct
  source 1..18: mol_type = other DNA
cgtaggatgtttccattg

SEQ ID NO: 33022 - DNA, 18 bp, synthetic construct
  source 1..18: mol_type = other DNA
acgtaggatgtttccatt

SEQ ID NO: 33023 - DNA, 18 bp, synthetic construct
  source 1..18: mol_type = other DNA
aacgtaggatgtttccat

SEQ ID NO: 33024 - DNA, 18 bp, synthetic construct
  source 1..18: mol_type = other DNA
gaacgtaggatgtttcca

SEQ ID NO: 33025 - DNA, 18 bp, synthetic construct
  source 1..18: mol_type = other DNA
ggaacgtaggatgtttcc

SEQ ID NO: 33026 - DNA, 18 bp, synthetic construct
  source 1..18: mol_type = other DNA
tggaacgtaggatgtttc

SEQ ID NO: 33027 - DNA, 18 bp, synthetic construct
  source 1..18: mol_type = other DNA
ttggaacgtaggatgttt

SEQ ID NO: 33028 - DNA, 18 bp, synthetic construct
  source 1..18: mol_type = other DNA
tttggaacgtaggatgtt

SEQ ID NO: 33029 - DNA, 18 bp, synthetic construct
  source 1..18: mol_type = other DNA
ttttggaacgtaggatgt

SEQ ID NO: 33030 - DNA, 18 bp, synthetic construct
  source 1..18: mol_type = other DNA
cttttggaacgtaggatg

SEQ ID NO: 33031 - DNA, 18 bp, synthetic construct
  source 1..18: mol_type = other DNA
gcttttggaacgtaggat

SEQ ID NO: 33032 - DNA, 18 bp, synthetic construct
  source 1..18: mol_type = other DNA
ggcttttggaacgtagga

SEQ ID NO: 33033 - DNA, 18 bp, synthetic construct
  source 1..18: mol_type = other DNA
aggcttttggaacgtagg

SEQ ID NO: 33034 - DNA, 18 bp, synthetic construct
  source 1..18: mol_type = other DNA
taggcttttggaacgtag

SEQ ID NO: 33035 - DNA, 18 bp, synthetic construct
  source 1..18: mol_type = other DNA
gtaggcttttggaacgta

SEQ ID NO: 33036 - DNA, 18 bp, synthetic construct
  source 1..18: mol_type = other DNA
agtaggcttttggaacgt

SEQ ID NO: 33037 - DNA, 18 bp, synthetic construct
  source 1..18: mol_type = other DNA
gagtaggcttttggaacg

SEQ ID NO: 33038 - DNA, 18 bp, synthetic construct
  source 1..18: mol_type = other DNA
tgagtaggcttttggaac

SEQ ID NO: 33039 - DNA, 18 bp, synthetic construct
  source 1..18: mol_type = other DNA
ttgagtaggcttttggaa

SEQ ID NO: 33040 - DNA, 18 bp, synthetic construct
  source 1..18: mol_type = other DNA
cttgagtaggcttttgga

SEQ ID NO: 33041 - DNA, 18 bp, synthetic construct
  source 1..18: mol_type = other DNA
gcttgagtaggcttttgg

SEQ ID NO: 33042 - DNA, 18 bp, synthetic construct
  source 1..18: mol_type = other DNA
ggcttgagtaggcttttg

SEQ ID NO: 33043 - DNA, 18 bp, synthetic construct
  source 1..18: mol_type = other DNA
tggcttgagtaggctttt

SEQ ID NO: 33044 - DNA, 18 bp, synthetic construct
  source 1..18: mol_type = other DNA
atggcttgagtaggcttt

SEQ ID NO: 33045 - DNA, 18 bp, synthetic construct
  source 1..18: mol_type = other DNA
aatggcttgagtaggctt

SEQ ID NO: 33046 - DNA, 18 bp, synthetic construct
  source 1..18: mol_type = other DNA
aaatggcttgagtaggct

SEQ ID NO: 33047 - DNA, 18 bp, synthetic construct
  source 1..18: mol_type = other DNA
caaatggcttgagtaggc

SEQ ID NO: 33048 - DNA, 18 bp, synthetic construct
  source 1..18: mol_type = other DNA
acaaatggcttgagtagg

SEQ ID NO: 33049 - DNA, 18 bp, synthetic construct
  source 1..18: mol_type = other DNA
ctgccattcataagtatt

SEQ ID NO: 33050 - DNA, 18 bp, synthetic construct
  source 1..18: mol_type = other DNA
tctgccattcataagtat

SEQ ID NO: 33051 - DNA, 18 bp, synthetic construct
  source 1..18: mol_type = other DNA
ctctgccattcataagta

SEQ ID NO: 33052 - DNA, 18 bp, synthetic construct
  source 1..18: mol_type = other DNA
tctctgccattcataagt

SEQ ID NO: 33053 - DNA, 18 bp, synthetic construct
  source 1..18: mol_type = other DNA
atctctgccattcataag

SEQ ID NO: 33054 - DNA, 18 bp, synthetic construct
  source 1..18: mol_type = other DNA
gatctctgccattcataa

SEQ ID NO: 33055 - DNA, 18 bp, synthetic construct
  source 1..18: mol_type = other DNA
agatctctgccattcata

SEQ ID NO: 33056 - DNA, 18 bp, synthetic construct
  source 1..18: mol_type = other DNA
tagatctctgccattcat

SEQ ID NO: 33057 - DNA, 18 bp, synthetic construct
  source 1..18: mol_type = other DNA
gtagatctctgccattca

SEQ ID NO: 33058 - DNA, 18 bp, synthetic construct
  source 1..18: mol_type = other DNA
tgtagatctctgccattc

SEQ ID NO: 33059 - DNA, 18 bp, synthetic construct
  source 1..18: mol_type = other DNA
ctgtagatctctgccatt

SEQ ID NO: 33060 - DNA, 18 bp, synthetic construct
  source 1..18: mol_type = other DNA
tctgtagatctctgccat

SEQ ID NO: 33061 - DNA, 18 bp, synthetic construct
  source 1..18: mol_type = other DNA
atctgtagatctctgcca

SEQ ID NO: 33062 - DNA, 18 bp, synthetic construct
  source 1..18: mol_type = other DNA
aatctgtagatctctgcc

SEQ ID NO: 33063 - DNA, 18 bp, synthetic construct
  source 1..18: mol_type = other DNA
aaatctgtagatctctgc

SEQ ID NO: 33064 - DNA, 18 bp, synthetic construct
  source 1..18: mol_type = other DNA
gcatcatttcttacatca

SEQ ID NO: 33065 - DNA, 18 bp, synthetic construct
  source 1..18: mol_type = other DNA
agcatcatttcttacatc

SEQ ID NO: 33066 - DNA, 18 bp, synthetic construct
  source 1..18: mol_type = other DNA
gagcatcatttcttacat

SEQ ID NO: 33067 - DNA, 18 bp, synthetic construct
  source 1..18: mol_type = other DNA
tgagcatcatttcttaca

SEQ ID NO: 33068 - DNA, 18 bp, synthetic construct
  source 1..18: mol_type = other DNA
gtgagcatcatttcttac

SEQ ID NO: 33069 - DNA, 18 bp, synthetic construct
  source 1..18: mol_type = other DNA
ggtgagcatcatttctta

SEQ ID NO: 33070 - DNA, 18 bp, synthetic construct
  source 1..18: mol_type = other DNA
tggtgagcatcatttctt

SEQ ID NO: 33071 - DNA, 18 bp, synthetic construct
  source 1..18: mol_type = other DNA
ctggtgagcatcatttct

SEQ ID NO: 33072 - DNA, 18 bp, synthetic construct
  source 1..18: mol_type = other DNA
gctggtgagcatcatttc

SEQ ID NO: 33073 - DNA, 18 bp, synthetic construct
  source 1..18: mol_type = other DNA
agctggtgagcatcattt

SEQ ID NO: 33074 - DNA, 18 bp, synthetic construct
  source 1..18: mol_type = other DNA
cagctggtgagcatcatt

SEQ ID NO: 33075 - DNA, 18 bp, synthetic construct
  source 1..18: mol_type = other DNA
ccagctggtgagcatcat

SEQ ID NO: 33076 - DNA, 18 bp, synthetic construct
  source 1..18: mol_type = other DNA
tgtggggtggtagcagta

SEQ ID NO: 33077 - DNA, 18 bp, synthetic construct
  source 1..18: mol_type = other DNA
ttgtggggtggtagcagt

SEQ ID NO: 33078 - DNA, 18 bp, synthetic construct
  source 1..18: mol_type = other DNA
gttgtggggtggtagcag

SEQ ID NO: 33079 - DNA, 18 bp, synthetic construct
  source 1..18: mol_type = other DNA
acatttgtccagtatgct

SEQ ID NO: 33080 - DNA, 18 bp, synthetic construct
  source 1..18: mol_type = other DNA
gacatttgtccagtatgc

SEQ ID NO: 33081 - DNA, 18 bp, synthetic construct
  source 1..18: mol_type = other DNA
agacatttgtccagtatg

SEQ ID NO: 33082 - DNA, 18 bp, synthetic construct
  source 1..18: mol_type = other DNA
tagacatttgtccagtat

SEQ ID NO: 33083 - DNA, 18 bp, synthetic construct
  source 1..18: mol_type = other DNA
ttagacatttgtccagta

SEQ ID NO: 33084 - DNA, 18 bp, synthetic construct
  source 1..18: mol_type = other DNA
cttagacatttgtccagt

SEQ ID NO: 33085 - DNA, 18 bp, synthetic construct
  source 1..18: mol_type = other DNA
gcttagacatttgtccag

SEQ ID NO: 33086 - DNA, 18 bp, synthetic construct
  source 1..18: mol_type = other DNA
ggcttagacatttgtcca

SEQ ID NO: 33087 - DNA, 18 bp, synthetic construct
  source 1..18: mol_type = other DNA
aggcttagacatttgtcc

SEQ ID NO: 33088 - DNA, 18 bp, synthetic construct
  source 1..18: mol_type = other DNA
gaggcttagacatttgtc

SEQ ID NO: 33089 - DNA, 18 bp, synthetic construct
  source 1..18: mol_type = other DNA
cgaggcttagacatttgt

SEQ ID NO: 33090 - DNA, 18 bp, synthetic construct
  source 1..18: mol_type = other DNA
acgaggcttagacatttg

SEQ ID NO: 33091 - DNA, 18 bp, synthetic construct
  source 1..18: mol_type = other DNA
cacgaggcttagacattt

SEQ ID NO: 33092 - DNA, 18 bp, synthetic construct
  source 1..18: mol_type = other DNA
ccacgaggcttagacatt

SEQ ID NO: 33093 - DNA, 18 bp, synthetic construct
  source 1..18: mol_type = other DNA
accacgaggcttagacat

SEQ ID NO: 33094 - DNA, 18 bp, synthetic construct
  source 1..18: mol_type = other DNA
aaccacgaggcttagaca

SEQ ID NO: 33095 - DNA, 18 bp, synthetic construct
  source 1..18: mol_type = other DNA
taaccacgaggcttagac

SEQ ID NO: 33096 - DNA, 18 bp, synthetic construct
  source 1..18: mol_type = other DNA
ctaaccacgaggcttaga

SEQ ID NO: 33097 - DNA, 18 bp, synthetic construct
  source 1..18: mol_type = other DNA
actaaccacgaggcttag

SEQ ID NO: 33098 - DNA, 18 bp, synthetic construct
  source 1..18: mol_type = other DNA
cactaaccacgaggctta

SEQ ID NO: 33099 - DNA, 18 bp, synthetic construct
  source 1..18: mol_type = other DNA
ccactaaccacgaggctt

SEQ ID NO: 33100 - DNA, 18 bp, synthetic construct
  source 1..18: mol_type = other DNA
cccactaaccacgaggct

SEQ ID NO: 33101 - DNA, 18 bp, synthetic construct
  source 1..18: mol_type = other DNA
ccccactaaccacgaggc

SEQ ID NO: 33102 - DNA, 18 bp, synthetic construct
  source 1..18: mol_type = other DNA
tccccactaaccacgagg

SEQ ID NO: 33103 - DNA, 18 bp, synthetic construct
  source 1..18: mol_type = other DNA
gtccccactaaccacgag

SEQ ID NO: 33104 - DNA, 18 bp, synthetic construct
  source 1..18: mol_type = other DNA
tgtccccactaaccacga

SEQ ID NO: 33105 - DNA, 18 bp, synthetic construct
  source 1..18: mol_type = other DNA
atgtccccactaaccacg

SEQ ID NO: 33106 - DNA, 18 bp, synthetic construct
  source 1..18: mol_type = other DNA
aatgtccccactaaccac

SEQ ID NO: 33107 - DNA, 18 bp, synthetic construct
  source 1..18: mol_type = other DNA
caatgtccccactaacca

SEQ ID NO: 33108 - DNA, 18 bp, synthetic construct
  source 1..18: mol_type = other DNA
gcaatgtccccactaacc

SEQ ID NO: 33109 - DNA, 18 bp, synthetic construct
  source 1..18: mol_type = other DNA
agcaatgtccccactaac

SEQ ID NO: 33110 - DNA, 18 bp, synthetic construct
  source 1..18: mol_type = other DNA
cagcaatgtccccactaa

SEQ ID NO: 33111 - DNA, 18 bp, synthetic construct
  source 1..18: mol_type = other DNA
ccagcaatgtccccacta

SEQ ID NO: 33112 - DNA, 18 bp, synthetic construct
  source 1..18: mol_type = other DNA
accagcaatgtccccact

SEQ ID NO: 33113 - DNA, 18 bp, synthetic construct
  source 1..18: mol_type = other DNA
caccagcaatgtccccac

SEQ ID NO: 33114 - DNA, 18 bp, synthetic construct
  source 1..18: mol_type = other DNA
ccaccagcaatgtcccca

SEQ ID NO: 33115 - DNA, 18 bp, synthetic construct
  source 1..18: mol_type = other DNA
tccaccagcaatgtcccc

SEQ ID NO: 33116 - DNA, 18 bp, synthetic construct
  source 1..18: mol_type = other DNA
ctccaccagcaatgtccc

SEQ ID NO: 33117 - DNA, 18 bp, synthetic construct
  source 1..18: mol_type = other DNA
actccaccagcaatgtcc

SEQ ID NO: 33118 - DNA, 18 bp, synthetic construct
  source 1..18: mol_type = other DNA
gactccaccagcaatgtc

SEQ ID NO: 33119 - DNA, 18 bp, synthetic construct
  source 1..18: mol_type = other DNA
agactccaccagcaatgt

SEQ ID NO: 33120 - DNA, 18 bp, synthetic construct
  source 1..18: mol_type = other DNA
cagactccaccagcaatg

SEQ ID NO: 33121 - DNA, 18 bp, synthetic construct
  source 1..18: mol_type = other DNA
tcagactccaccagcaat

SEQ ID NO: 33122 - DNA, 18 bp, synthetic construct
  source 1..18: mol_type = other DNA
ttcagactccaccagcaa

SEQ ID NO: 33123 - DNA, 18 bp, synthetic construct
  source 1..18: mol_type = other DNA
tttcagactccaccagca

SEQ ID NO: 33124 - DNA, 18 bp, synthetic construct
  source 1..18: mol_type = other DNA
atttcagactccaccagc

SEQ ID NO: 33125 - DNA, 18 bp, synthetic construct
  source 1..18: mol_type = other DNA
aatttcagactccaccag

SEQ ID NO: 33126 - DNA, 18 bp, synthetic construct
  source 1..18: mol_type = other DNA
caatttcagactccacca

SEQ ID NO: 33127 - DNA, 18 bp, synthetic construct
  source 1..18: mol_type = other DNA
acaatttcagactccacc

SEQ ID NO: 33128 - DNA, 18 bp, synthetic construct
  source 1..18: mol_type = other DNA
gacaatttcagactccac

SEQ ID NO: 33129 - DNA, 18 bp, synthetic construct
  source 1..18: mol_type = other DNA
tgacaatttcagactcca

SEQ ID NO: 33130 - DNA, 18 bp, synthetic construct
  source 1..18: mol_type = other DNA
atgacaatttcagactcc

SEQ ID NO: 33131 - DNA, 18 bp, synthetic construct
  source 1..18: mol_type = other DNA
gcatgacaatttcagact

SEQ ID NO: 33132 - DNA, 18 bp, synthetic construct
  source 1..18: mol_type = other DNA
ctgcatgacaatttcaga

SEQ ID NO: 33133 - DNA, 18 bp, synthetic construct
  source 1..18: mol_type = other DNA
cactgcatgacaatttca

SEQ ID NO: 33134 - DNA, 18 bp, synthetic construct
  source 1..18: mol_type = other DNA
tcactgcatgacaatttc

SEQ ID NO: 33135 - DNA, 18 bp, synthetic construct
  source 1..18: mol_type = other DNA
gtcactgcatgacaattt

SEQ ID NO: 33136 - DNA, 18 bp, synthetic construct
  source 1..18: mol_type = other DNA
agtcactgcatgacaatt

SEQ ID NO: 33137 - DNA, 18 bp, synthetic construct
  source 1..18: mol_type = other DNA
gagtcactgcatgacaat

SEQ ID NO: 33138 - DNA, 18 bp, synthetic construct
  source 1..18: mol_type = other DNA
tgagtcactgcatgacaa

SEQ ID NO: 33139 - DNA, 18 bp, synthetic construct
  source 1..18: mol_type = other DNA
gtgagtcactgcatgaca

SEQ ID NO: 33140 - DNA, 18 bp, synthetic construct
  source 1..18: mol_type = other DNA
agtgagtcactgcatgac

SEQ ID NO: 33141 - DNA, 18 bp, synthetic construct
  source 1..18: mol_type = other DNA
gagtgagtcactgcatga

SEQ ID NO: 33142 - DNA, 18 bp, synthetic construct
  source 1..18: mol_type = other DNA
tgagtgagtcactgcatg

SEQ ID NO: 33143 - DNA, 18 bp, synthetic construct
  source 1..18: mol_type = other DNA
ttgagtgagtcactgcat

SEQ ID NO: 33144 - DNA, 18 bp, synthetic construct
  source 1..18: mol_type = other DNA
cttgagtgagtcactgca

SEQ ID NO: 33145 - DNA, 18 bp, synthetic construct
  source 1..18: mol_type = other DNA
gcttgagtgagtcactgc

SEQ ID NO: 33146 - DNA, 18 bp, synthetic construct
  source 1..18: mol_type = other DNA
agcttgagtgagtcactg

SEQ ID NO: 33147 - DNA, 18 bp, synthetic construct
  source 1..18: mol_type = other DNA
aagcttgagtgagtcact

SEQ ID NO: 33148 - DNA, 18 bp, synthetic construct
  source 1..18: mol_type = other DNA
taagcttgagtgagtcac

SEQ ID NO: 33149 - DNA, 18 bp, synthetic construct
  source 1..18: mol_type = other DNA
ctaagcttgagtgagtca

SEQ ID NO: 33150 - DNA, 18 bp, synthetic construct
  source 1..18: mol_type = other DNA
cctaagcttgagtgagtc

SEQ ID NO: 33151 - DNA, 18 bp, synthetic construct
  source 1..18: mol_type = other DNA
gcctaagcttgagtgagt

SEQ ID NO: 33152 - DNA, 18 bp, synthetic construct
  source 1..18: mol_type = other DNA
tgcctaagcttgagtgag

SEQ ID NO: 33153 - DNA, 18 bp, synthetic construct
  source 1..18: mol_type = other DNA
ctgcctaagcttgagtga

SEQ ID NO: 33154 - DNA, 18 bp, synthetic construct
  source 1..18: mol_type = other DNA
tctgcctaagcttgagtg

SEQ ID NO: 33155 - DNA, 18 bp, synthetic construct
  source 1..18: mol_type = other DNA
atctgcctaagcttgagt

SEQ ID NO: 33156 - DNA, 18 bp, synthetic construct
  source 1..18: mol_type = other DNA
aatctgcctaagcttgag

SEQ ID NO: 33157 - DNA, 18 bp, synthetic construct
  source 1..18: mol_type = other DNA
aaatctgcctaagcttga

SEQ ID NO: 33158 - DNA, 18 bp, synthetic construct
  source 1..18: mol_type = other DNA
caaatctgcctaagcttg

SEQ ID NO: 33159 - DNA, 18 bp, synthetic construct
  source 1..18: mol_type = other DNA
ccaaatctgcctaagctt

SEQ ID NO: 33160 - DNA, 18 bp, synthetic construct
  source 1..18: mol_type = other DNA
accaaatctgcctaagct

SEQ ID NO: 33161 - DNA, 18 bp, synthetic construct
  source 1..18: mol_type = other DNA
caccaaatctgcctaagc

SEQ ID NO: 33162 - DNA, 18 bp, synthetic construct
  source 1..18: mol_type = other DNA
tcaccaaatctgcctaag

SEQ ID NO: 33163 - DNA, 18 bp, synthetic construct
  source 1..18: mol_type = other DNA
atcaccaaatctgcctaa

SEQ ID NO: 33164 - DNA, 18 bp, synthetic construct
  source 1..18: mol_type = other DNA
tatcaccaaatctgccta

SEQ ID NO: 33165 - DNA, 18 bp, synthetic construct
  source 1..18: mol_type = other DNA
atatcaccaaatctgcct

SEQ ID NO: 33166 - DNA, 18 bp, synthetic construct
  source 1..18: mol_type = other DNA
tatatcaccaaatctgcc

SEQ ID NO: 33167 - DNA, 18 bp, synthetic construct
  source 1..18: mol_type = other DNA
tgtgtcatatatcaccaa

SEQ ID NO: 33168 - DNA, 18 bp, synthetic construct
  source 1..18: mol_type = other DNA
ctgtgtcatatatcacca

SEQ ID NO: 33169 - DNA, 18 bp, synthetic construct
  source 1..18: mol_type = other DNA
tctgtgtcatatatcacc

SEQ ID NO: 33170 - DNA, 18 bp, synthetic construct
  source 1..18: mol_type = other DNA
ctctgtgtcatatatcac

SEQ ID NO: 33171 - DNA, 18 bp, synthetic construct
  source 1..18: mol_type = other DNA
tctctgtgtcatatatca

SEQ ID NO: 33172 - DNA, 18 bp, synthetic construct
  source 1..18: mol_type = other DNA
atctctgtgtcatatatc

SEQ ID NO: 33173 - DNA, 18 bp, synthetic construct
  source 1..18: mol_type = other DNA
catctctgtgtcatatat

SEQ ID NO: 33174 - DNA, 18 bp, synthetic construct
  source 1..18: mol_type = other DNA
gcatctctgtgtcatata

SEQ ID NO: 33175 - DNA, 18 bp, synthetic construct
  source 1..18: mol_type = other DNA
tgcatctctgtgtcatat

SEQ ID NO: 33176 - DNA, 18 bp, synthetic construct
  source 1..18: mol_type = other DNA
ttgcatctctgtgtcata

SEQ ID NO: 33177 - DNA, 18 bp, synthetic construct
  source 1..18: mol_type = other DNA
tttgcatctctgtgtcat

SEQ ID NO: 33178 - DNA, 18 bp, synthetic construct
  source 1..18: mol_type = other DNA
ctttgcatctctgtgtca

SEQ ID NO: 33179 - DNA, 18 bp, synthetic construct
  source 1..18: mol_type = other DNA
tctttgcatctctgtgtc

SEQ ID NO: 33180 - DNA, 18 bp, synthetic construct
  source 1..18: mol_type = other DNA
ttctttgcatctctgtgt

SEQ ID NO: 33181 - DNA, 18 bp, synthetic construct
  source 1..18: mol_type = other DNA
tttctttgcatctctgtg

SEQ ID NO: 33182 - DNA, 18 bp, synthetic construct
  source 1..18: mol_type = other DNA
atttctttgcatctctgt

SEQ ID NO: 33183 - DNA, 18 bp, synthetic construct
  source 1..18: mol_type = other DNA
catttctttgcatctctg

SEQ ID NO: 33184 - DNA, 18 bp, synthetic construct
  source 1..18: mol_type = other DNA
acatttctttgcatctct

SEQ ID NO: 33185 - DNA, 18 bp, synthetic construct
  source 1..18: mol_type = other DNA
aacatttctttgcatctc

SEQ ID NO: 33186 - DNA, 18 bp, synthetic construct
  source 1..18: mol_type = other DNA
caacatttctttgcatct

SEQ ID NO: 33187 - DNA, 18 bp, synthetic construct
  source 1..18: mol_type = other DNA
ctacaacatttctttgca

SEQ ID NO: 33188 - DNA, 18 bp, synthetic construct
  source 1..18: mol_type = other DNA
gctacaacatttctttgc

SEQ ID NO: 33189 - DNA, 18 bp, synthetic construct
  source 1..18: mol_type = other DNA
cagctacaacatttcttt

SEQ ID NO: 33190 - DNA, 18 bp, synthetic construct
  source 1..18: mol_type = other DNA
tcagctacaacatttctt

SEQ ID NO: 33191 - DNA, 18 bp, synthetic construct
  source 1..18: mol_type = other DNA
gtcagctacaacatttct

SEQ ID NO: 33192 - DNA, 18 bp, synthetic construct
  source 1..18: mol_type = other DNA
tgtcagctacaacatttc

SEQ ID NO: 33193 - DNA, 18 bp, synthetic construct
  source 1..18: mol_type = other DNA
gtgtcagctacaacattt

SEQ ID NO: 33194 - DNA, 18 bp, synthetic construct
  source 1..18: mol_type = other DNA
tgtgtcagctacaacatt

SEQ ID NO: 33195 - DNA, 18 bp, synthetic construct
  source 1..18: mol_type = other DNA
gtgtgtcagctacaacat

SEQ ID NO: 33196 - DNA, 18 bp, synthetic construct
  source 1..18: mol_type = other DNA
tgtgtgtcagctacaaca

SEQ ID NO: 33197 - DNA, 18 bp, synthetic construct
  source 1..18: mol_type = other DNA
gtgtgtgtcagctacaac

SEQ ID NO: 33198 - DNA, 18 bp, synthetic construct
  source 1..18: mol_type = other DNA
tgtgtgtgtcagctacaa

SEQ ID NO: 33199 - DNA, 18 bp, synthetic construct
  source 1..18: mol_type = other DNA
ctgtgtgtgtcagctaca

SEQ ID NO: 33200 - DNA, 18 bp, synthetic construct
  source 1..18: mol_type = other DNA
cctgtgtgtgtcagctac

SEQ ID NO: 33201 - DNA, 18 bp, synthetic construct
  source 1..18: mol_type = other DNA
ccagcctgtgtgtgtcag

SEQ ID NO: 33202 - DNA, 18 bp, synthetic construct
  source 1..18: mol_type = other DNA
agagccagcctgtgtgtg

SEQ ID NO: 33203 - DNA, 18 bp, synthetic construct
  source 1..18: mol_type = other DNA
tgcatctcccagagccag

SEQ ID NO: 33204 - DNA, 18 bp, synthetic construct
  source 1..18: mol_type = other DNA
ttctgcatctcccagagc

SEQ ID NO: 33205 - DNA, 18 bp, synthetic construct
  source 1..18: mol_type = other DNA
cttctgcatctcccagag

SEQ ID NO: 33206 - DNA, 18 bp, synthetic construct
  source 1..18: mol_type = other DNA
ccttctgcatctcccaga

SEQ ID NO: 33207 - DNA, 18 bp, synthetic construct
  source 1..18: mol_type = other DNA
tccttctgcatctcccag

SEQ ID NO: 33208 - DNA, 18 bp, synthetic construct
  source 1..18: mol_type = other DNA
gtgctccttctgcatctc

SEQ ID NO: 33209 - DNA, 18 bp, synthetic construct
  source 1..18: mol_type = other DNA
cgtgctccttctgcatct

SEQ ID NO: 33210 - DNA, 18 bp, synthetic construct
  source 1..18: mol_type = other DNA
acgtgctccttctgcatc

SEQ ID NO: 33211 - DNA, 18 bp, synthetic construct
  source 1..18: mol_type = other DNA
gacgtgctccttctgcat

SEQ ID NO: 33212 - DNA, 18 bp, synthetic construct
  source 1..18: mol_type = other DNA
ggacgtgctccttctgca

SEQ ID NO: 33213 - DNA, 18 bp, synthetic construct
  source 1..18: mol_type = other DNA
ggggacgtgctccttctg

SEQ ID NO: 33214 - DNA, 18 bp, synthetic construct
  source 1..18: mol_type = other DNA
tgggggacgtgctccttc

SEQ ID NO: 33215 - DNA, 18 bp, synthetic construct
  source 1..18: mol_type = other DNA
ttgggggacgtgctcctt

SEQ ID NO: 33216 - DNA, 18 bp, synthetic construct
  source 1..18: mol_type = other DNA
tttgggggacgtgctcct

SEQ ID NO: 33217 - DNA, 18 bp, synthetic construct
  source 1..18: mol_type = other DNA
ttttgggggacgtgctcc

SEQ ID NO: 33218 - DNA, 18 bp, synthetic construct
  source 1..18: mol_type = other DNA
attttgggggacgtgctc

SEQ ID NO: 33219 - DNA, 18 bp, synthetic construct
  source 1..18: mol_type = other DNA
cattttgggggacgtgct

SEQ ID NO: 33220 - DNA, 18 bp, synthetic construct
  source 1..18: mol_type = other DNA
tcattttgggggacgtgc

SEQ ID NO: 33221 - DNA, 18 bp, synthetic construct
  source 1..18: mol_type = other DNA
ttcattttgggggacgtg

SEQ ID NO: 33222 - DNA, 18 bp, synthetic construct
  source 1..18: mol_type = other DNA
cttcattttgggggacgt

SEQ ID NO: 33223 - DNA, 18 bp, synthetic construct
  source 1..18: mol_type = other DNA
gcttcattttgggggacg

SEQ ID NO: 33224 - DNA, 18 bp, synthetic construct
  source 1..18: mol_type = other DNA
ggcttcattttgggggac

SEQ ID NO: 33225 - DNA, 18 bp, synthetic construct
  source 1..18: mol_type = other DNA
tggcttcattttggggga

SEQ ID NO: 33226 - DNA, 18 bp, synthetic construct
  source 1..18: mol_type = other DNA
ctggcttcattttggggg

SEQ ID NO: 33227 - DNA, 18 bp, synthetic construct
  source 1..18: mol_type = other DNA
tctggcttcattttgggg

SEQ ID NO: 33228 - DNA, 18 bp, synthetic construct
  source 1..18: mol_type = other DNA
gtctggcttcattttggg

SEQ ID NO: 33229 - DNA, 18 bp, synthetic construct
  source 1..18: mol_type = other DNA
tgtctggcttcattttgg

SEQ ID NO: 33230 - DNA, 18 bp, synthetic construct
  source 1..18: mol_type = other DNA
ctgtctggcttcattttg

SEQ ID NO: 33231 - DNA, 18 bp, synthetic construct
  source 1..18: mol_type = other DNA
tctgtctggcttcatttt

SEQ ID NO: 33232 - DNA, 18 bp, synthetic construct
  source 1..18: mol_type = other DNA
gtctgtctggcttcattt

SEQ ID NO: 33233 - DNA, 18 bp, synthetic construct
  source 1..18: mol_type = other DNA
tgtctgtctggcttcatt

SEQ ID NO: 33234 - DNA, 18 bp, synthetic construct
  source 1..18: mol_type = other DNA
atgtctgtctggcttcat

SEQ ID NO: 33235 - DNA, 18 bp, synthetic construct
  source 1..18: mol_type = other DNA
gatgtctgtctggcttca

SEQ ID NO: 33236 - DNA, 18 bp, synthetic construct
  source 1..18: mol_type = other DNA
ggatgtctgtctggcttc

SEQ ID NO: 33237 - DNA, 18 bp, synthetic construct
  source 1..18: mol_type = other DNA
aggatgtctgtctggctt

SEQ ID NO: 33238 - DNA, 18 bp, synthetic construct
  source 1..18: mol_type = other DNA
aaggatgtctgtctggct

SEQ ID NO: 33239 - DNA, 18 bp, synthetic construct
  source 1..18: mol_type = other DNA
taaggatgtctgtctggc

SEQ ID NO: 33240 - DNA, 18 bp, synthetic construct
  source 1..18: mol_type = other DNA
ttaaggatgtctgtctgg

SEQ ID NO: 33241 - DNA, 18 bp, synthetic construct
  source 1..18: mol_type = other DNA
cttaaggatgtctgtctg

SEQ ID NO: 33242 - DNA, 18 bp, synthetic construct
  source 1..18: mol_type = other DNA
ccttaaggatgtctgtct

SEQ ID NO: 33243 - DNA, 18 bp, synthetic construct
  source 1..18: mol_type = other DNA
tccttaaggatgtctgtc

SEQ ID NO: 33244 - DNA, 18 bp, synthetic construct
  source 1..18: mol_type = other DNA
ttccttaaggatgtctgt

SEQ ID NO: 33245 - DNA, 18 bp, synthetic construct
  source 1..18: mol_type = other DNA
cttccttaaggatgtctg

SEQ ID NO: 33246 - DNA, 18 bp, synthetic construct
  source 1..18: mol_type = other DNA
ccttccttaaggatgtct

SEQ ID NO: 33247 - DNA, 18 bp, synthetic construct
  source 1..18: mol_type = other DNA
tccttccttaaggatgtc

SEQ ID NO: 33248 - DNA, 18 bp, synthetic construct
  source 1..18: mol_type = other DNA
ctccttccttaaggatgt

SEQ ID NO: 33249 - DNA, 18 bp, synthetic construct
  source 1..18: mol_type = other DNA
gctccttccttaaggatg

SEQ ID NO: 33250 - DNA, 18 bp, synthetic construct
  source 1..18: mol_type = other DNA
tgctccttccttaaggat

SEQ ID NO: 33251 - DNA, 18 bp, synthetic construct
  source 1..18: mol_type = other DNA
ttgctccttccttaagga

SEQ ID NO: 33252 - DNA, 18 bp, synthetic construct
  source 1..18: mol_type = other DNA
tttgctccttccttaagg

SEQ ID NO: 33253 - DNA, 18 bp, synthetic construct
  source 1..18: mol_type = other DNA
ctttgctccttccttaag

SEQ ID NO: 33254 - DNA, 18 bp, synthetic construct
  source 1..18: mol_type = other DNA
cctttgctccttccttaa

SEQ ID NO: 33255 - DNA, 18 bp, synthetic construct
  source 1..18: mol_type = other DNA
ccctttgctccttcctta

SEQ ID NO: 33256 - DNA, 18 bp, synthetic construct
  source 1..18: mol_type = other DNA
gaagcccctttgctcctt

SEQ ID NO: 33257 - DNA, 18 bp, synthetic construct
  source 1..18: mol_type = other DNA
tgaagcccctttgctcct

SEQ ID NO: 33258 - DNA, 18 bp, synthetic construct
  source 1..18: mol_type = other DNA
atgaagcccctttgctcc

SEQ ID NO: 33259 - DNA, 18 bp, synthetic construct
  source 1..18: mol_type = other DNA
gatgaagcccctttgctc

SEQ ID NO: 33260 - DNA, 18 bp, synthetic construct
  source 1..18: mol_type = other DNA
agatgaagcccctttgct

SEQ ID NO: 33261 - DNA, 18 bp, synthetic construct
  source 1..18: mol_type = other DNA
aagatgaagcccctttgc

SEQ ID NO: 33262 - DNA, 18 bp, synthetic construct
  source 1..18: mol_type = other DNA
taagatgaagcccctttg

SEQ ID NO: 33263 - DNA, 18 bp, synthetic construct
  source 1..18: mol_type = other DNA
ttaagatgaagccccttt

SEQ ID NO: 33264 - DNA, 18 bp, synthetic construct
  source 1..18: mol_type = other DNA
tttaagatgaagcccctt

SEQ ID NO: 33265 - DNA, 18 bp, synthetic construct
  source 1..18: mol_type = other DNA
ctttaagatgaagcccct

SEQ ID NO: 33266 - DNA, 18 bp, synthetic construct
  source 1..18: mol_type = other DNA
tctttaagatgaagcccc

SEQ ID NO: 33267 - DNA, 18 bp, synthetic construct
  source 1..18: mol_type = other DNA
ttctttaagatgaagccc

SEQ ID NO: 33268 - DNA, 18 bp, synthetic construct
  source 1..18: mol_type = other DNA
ccttcttcattctttaag

SEQ ID NO: 33269 - DNA, 18 bp, synthetic construct
  source 1..18: mol_type = other DNA
cccttcttcattctttaa

SEQ ID NO: 33270 - DNA, 18 bp, synthetic construct
  source 1..18: mol_type = other DNA
tcccttcttcattcttta

SEQ ID NO: 33271 - DNA, 18 bp, synthetic construct
  source 1..18: mol_type = other DNA
atcccttcttcattcttt

SEQ ID NO: 33272 - DNA, 18 bp, synthetic construct
  source 1..18: mol_type = other DNA
aatcccttcttcattctt

SEQ ID NO: 33273 - DNA, 18 bp, synthetic construct
  source 1..18: mol_type = other DNA
aaatcccttcttcattct

SEQ ID NO: 33274 - DNA, 18 bp, synthetic construct
  source 1..18: mol_type = other DNA
caaatcccttcttcattc

SEQ ID NO: 33275 - DNA, 18 bp, synthetic construct
  source 1..18: mol_type = other DNA
acaaatcccttcttcatt

SEQ ID NO: 33276 - DNA, 18 bp, synthetic construct
  source 1..18: mol_type = other DNA
gacaaatcccttcttcat

SEQ ID NO: 33277 - DNA, 18 bp, synthetic construct
  source 1..18: mol_type = other DNA
tgacaaatcccttcttca

SEQ ID NO: 33278 - DNA, 18 bp, synthetic construct
  source 1..18: mol_type = other DNA
atgacaaatcccttcttc

SEQ ID NO: 33279 - DNA, 18 bp, synthetic construct
  source 1..18: mol_type = other DNA
catgacaaatcccttctt

SEQ ID NO: 33280 - DNA, 18 bp, synthetic construct
  source 1..18: mol_type = other DNA
tcatgacaaatcccttct

SEQ ID NO: 33281 - DNA, 18 bp, synthetic construct
  source 1..18: mol_type = other DNA
ctcatgacaaatcccttc

SEQ ID NO: 33282 - DNA, 18 bp, synthetic construct
  source 1..18: mol_type = other DNA
tctcatgacaaatccctt

SEQ ID NO: 33283 - DNA, 18 bp, synthetic construct
  source 1..18: mol_type = other DNA
ctctcatgacaaatccct

SEQ ID NO: 33284 - DNA, 18 bp, synthetic construct
  source 1..18: mol_type = other DNA
tctctcatgacaaatccc

SEQ ID NO: 33285 - DNA, 18 bp, synthetic construct
  source 1..18: mol_type = other DNA
atctctcatgacaaatcc

SEQ ID NO: 33286 - DNA, 18 bp, synthetic construct
  source 1..18: mol_type = other DNA
ccacatctctcatgacaa

SEQ ID NO: 33287 - DNA, 18 bp, synthetic construct
  source 1..18: mol_type = other DNA
gccacatctctcatgaca

SEQ ID NO: 33288 - DNA, 18 bp, synthetic construct
  source 1..18: mol_type = other DNA
tgccacatctctcatgac

SEQ ID NO: 33289 - DNA, 18 bp, synthetic construct
  source 1..18: mol_type = other DNA
ctgccacatctctcatga

SEQ ID NO: 33290 - DNA, 18 bp, synthetic construct
  source 1..18: mol_type = other DNA
cctgccacatctctcatg

SEQ ID NO: 33291 - DNA, 18 bp, synthetic construct
  source 1..18: mol_type = other DNA
tcctgccacatctctcat

SEQ ID NO: 33292 - DNA, 18 bp, synthetic construct
  source 1..18: mol_type = other DNA
ttcctgccacatctctca

SEQ ID NO: 33293 - DNA, 18 bp, synthetic construct
  source 1..18: mol_type = other DNA
attcctgccacatctctc

SEQ ID NO: 33294 - DNA, 18 bp, synthetic construct
  source 1..18: mol_type = other DNA
aattcctgccacatctct

SEQ ID NO: 33295 - DNA, 18 bp, synthetic construct
  source 1..18: mol_type = other DNA
aaattcctgccacatctc

SEQ ID NO: 33296 - DNA, 18 bp, synthetic construct
  source 1..18: mol_type = other DNA
gaaattcctgccacatct

SEQ ID NO: 33297 - DNA, 18 bp, synthetic construct
  source 1..18: mol_type = other DNA
agaaattcctgccacatc

SEQ ID NO: 33298 - DNA, 18 bp, synthetic construct
  source 1..18: mol_type = other DNA
aagaaattcctgccacat

SEQ ID NO: 33299 - DNA, 18 bp, synthetic construct
  source 1..18: mol_type = other DNA
caagaaattcctgccaca

SEQ ID NO: 33300 - DNA, 18 bp, synthetic construct
  source 1..18: mol_type = other DNA
tcaagaaattcctgccac

SEQ ID NO: 33301 - DNA, 18 bp, synthetic construct
  source 1..18: mol_type = other DNA
ctcaagaaattcctgcca

SEQ ID NO: 33302 - DNA, 18 bp, synthetic construct
  source 1..18: mol_type = other DNA
tctcaagaaattcctgcc

SEQ ID NO: 33303 - DNA, 18 bp, synthetic construct
  source 1..18: mol_type = other DNA
ctctcaagaaattcctgc

SEQ ID NO: 33304 - DNA, 18 bp, synthetic construct
  source 1..18: mol_type = other DNA
cctctcaagaaattcctg

SEQ ID NO: 33305 - DNA, 18 bp, synthetic construct
  source 1..18: mol_type = other DNA
gcctctcaagaaattcct

SEQ ID NO: 33306 - DNA, 18 bp, synthetic construct
  source 1..18: mol_type = other DNA
tgcctctcaagaaattcc

SEQ ID NO: 33307 - DNA, 18 bp, synthetic construct
  source 1..18: mol_type = other DNA
ctgcctctcaagaaattc

SEQ ID NO: 33308 - DNA, 18 bp, synthetic construct
  source 1..18: mol_type = other DNA
tctgcctctcaagaaatt

SEQ ID NO: 33309 - DNA, 18 bp, synthetic construct
  source 1..18: mol_type = other DNA
ctctgcctctcaagaaat

SEQ ID NO: 33310 - DNA, 18 bp, synthetic construct
  source 1..18: mol_type = other DNA
cctctgcctctcaagaaa

SEQ ID NO: 33311 - DNA, 18 bp, synthetic construct
  source 1..18: mol_type = other DNA
ccctctgcctctcaagaa

SEQ ID NO: 33312 - DNA, 18 bp, synthetic construct
  source 1..18: mol_type = other DNA
tccctctgcctctcaaga

SEQ ID NO: 33313 - DNA, 18 bp, synthetic construct
  source 1..18: mol_type = other DNA
ctccctctgcctctcaag

SEQ ID NO: 33314 - DNA, 18 bp, synthetic construct
  source 1..18: mol_type = other DNA
tctcatgctctccctctg

SEQ ID NO: 33315 - DNA, 18 bp, synthetic construct
  source 1..18: mol_type = other DNA
ttctcatgctctccctct

SEQ ID NO: 33316 - DNA, 18 bp, synthetic construct
  source 1..18: mol_type = other DNA
attctcatgctctccctc

SEQ ID NO: 33317 - DNA, 18 bp, synthetic construct
  source 1..18: mol_type = other DNA
cattctcatgctctccct

SEQ ID NO: 33318 - DNA, 18 bp, synthetic construct
  source 1..18: mol_type = other DNA
acattctcatgctctccc

SEQ ID NO: 33319 - DNA, 18 bp, synthetic construct
  source 1..18: mol_type = other DNA
aacattctcatgctctcc

SEQ ID NO: 33320 - DNA, 18 bp, synthetic construct
  source 1..18: mol_type = other DNA
taacattctcatgctctc

SEQ ID NO: 33321 - DNA, 18 bp, synthetic construct
  source 1..18: mol_type = other DNA
ctaacattctcatgctct

SEQ ID NO: 33322 - DNA, 18 bp, synthetic construct
  source 1..18: mol_type = other DNA
cctaacattctcatgctc

SEQ ID NO: 33323 - DNA, 18 bp, synthetic construct
  source 1..18: mol_type = other DNA
tcctaacattctcatgct

SEQ ID NO: 33324 - DNA, 18 bp, synthetic construct
  source 1..18: mol_type = other DNA
ttcctaacattctcatgc

SEQ ID NO: 33325 - DNA, 18 bp, synthetic construct
  source 1..18: mol_type = other DNA
cttcctaacattctcatg

SEQ ID NO: 33326 - DNA, 18 bp, synthetic construct
  source 1..18: mol_type = other DNA
ccttcctaacattctcat

SEQ ID NO: 33327 - DNA, 18 bp, synthetic construct
  source 1..18: mol_type = other DNA
gccttcctaacattctca

SEQ ID NO: 33328 - DNA, 18 bp, synthetic construct
  source 1..18: mol_type = other DNA
tgccttcctaacattctc

SEQ ID NO: 33329 - DNA, 18 bp, synthetic construct
  source 1..18: mol_type = other DNA
ctgccttcctaacattct

SEQ ID NO: 33330 - DNA, 18 bp, synthetic construct
  source 1..18: mol_type = other DNA
cctgccttcctaacattc

SEQ ID NO: 33331 - DNA, 18 bp, synthetic construct
  source 1..18: mol_type = other DNA
tcctgccttcctaacatt

SEQ ID NO: 33332 - DNA, 18 bp, synthetic construct
  source 1..18: mol_type = other DNA
ctcctgccttcctaacat

SEQ ID NO: 33333 - DNA, 18 bp, synthetic construct
  source 1..18: mol_type = other DNA
tctcctgccttcctaaca

SEQ ID NO: 33334 - DNA, 18 bp, synthetic construct
  source 1..18: mol_type = other DNA
ctctcctgccttcctaac

SEQ ID NO: 33335 - DNA, 18 bp, synthetic construct
  source 1..18: mol_type = other DNA
tctctcctgccttcctaa

SEQ ID NO: 33336 - DNA, 18 bp, synthetic construct
  source 1..18: mol_type = other DNA
gagagtctctcctgcctt

SEQ ID NO: 33337 - DNA, 18 bp, synthetic construct
  source 1..18: mol_type = other DNA
tgagagtctctcctgcct

SEQ ID NO: 33338 - DNA, 18 bp, synthetic construct
  source 1..18: mol_type = other DNA
tgtgagagtctctcctgc

SEQ ID NO: 33339 - DNA, 18 bp, synthetic construct
  source 1..18: mol_type = other DNA
gtgtgagagtctctcctg

SEQ ID NO: 33340 - DNA, 18 bp, synthetic construct
  source 1..18: mol_type = other DNA
tgtgtgagagtctctcct

SEQ ID NO: 33341 - DNA, 18 bp, synthetic construct
  source 1..18: mol_type = other DNA
atgtgtgagagtctctcc

SEQ ID NO: 33342 - DNA, 18 bp, synthetic construct
  source 1..18: mol_type = other DNA
gatgtgtgagagtctctc

SEQ ID NO: 33343 - DNA, 18 bp, synthetic construct
  source 1..18: mol_type = other DNA
agatgtgtgagagtctct

SEQ ID NO: 33344 - DNA, 18 bp, synthetic construct
  source 1..18: mol_type = other DNA
cagatgtgtgagagtctc

SEQ ID NO: 33345 - DNA, 18 bp, synthetic construct
  source 1..18: mol_type = other DNA
ccagatgtgtgagagtct

SEQ ID NO: 33346 - DNA, 18 bp, synthetic construct
  source 1..18: mol_type = other DNA
cccagatgtgtgagagtc

SEQ ID NO: 33347 - DNA, 18 bp, synthetic construct
  source 1..18: mol_type = other DNA
tcccagatgtgtgagagt

SEQ ID NO: 33348 - DNA, 18 bp, synthetic construct
  source 1..18: mol_type = other DNA
ttcccagatgtgtgagag

SEQ ID NO: 33349 - DNA, 18 bp, synthetic construct
  source 1..18: mol_type = other DNA
cttcccagatgtgtgaga

SEQ ID NO: 33350 - DNA, 18 bp, synthetic construct
  source 1..18: mol_type = other DNA
gcttcccagatgtgtgag

SEQ ID NO: 33351 - DNA, 18 bp, synthetic construct
  source 1..18: mol_type = other DNA
agcttcccagatgtgtga

SEQ ID NO: 33352 - DNA, 18 bp, synthetic construct
  source 1..18: mol_type = other DNA
cagcttcccagatgtgtg

SEQ ID NO: 33353 - DNA, 18 bp, synthetic construct
  source 1..18: mol_type = other DNA
tcagcttcccagatgtgt

SEQ ID NO: 33354 - DNA, 18 bp, synthetic construct
  source 1..18: mol_type = other DNA
gtcagcttcccagatgtg

SEQ ID NO: 33355 - DNA, 18 bp, synthetic construct
  source 1..18: mol_type = other DNA
tgtcagcttcccagatgt

SEQ ID NO: 33356 - DNA, 18 bp, synthetic construct
  source 1..18: mol_type = other DNA
ttgtcagcttcccagatg

SEQ ID NO: 33357 - DNA, 18 bp, synthetic construct
  source 1..18: mol_type = other DNA
attgtcagcttcccagat

SEQ ID NO: 33358 - DNA, 18 bp, synthetic construct
  source 1..18: mol_type = other DNA
gattgtcagcttcccaga

SEQ ID NO: 33359 - DNA, 18 bp, synthetic construct
  source 1..18: mol_type = other DNA
ggattgtcagcttcccag

SEQ ID NO: 33360 - DNA, 18 bp, synthetic construct
  source 1..18: mol_type = other DNA
tggattgtcagcttccca

SEQ ID NO: 33361 - DNA, 18 bp, synthetic construct
  source 1..18: mol_type = other DNA
atggattgtcagcttccc

SEQ ID NO: 33362 - DNA, 18 bp, synthetic construct
  source 1..18: mol_type = other DNA
gatggattgtcagcttcc

SEQ ID NO: 33363 - DNA, 18 bp, synthetic construct
  source 1..18: mol_type = other DNA
tgatggattgtcagcttc

SEQ ID NO: 33364 - DNA, 18 bp, synthetic construct
  source 1..18: mol_type = other DNA
ctgatggattgtcagctt

SEQ ID NO: 33365 - DNA, 18 bp, synthetic construct
  source 1..18: mol_type = other DNA
gctgatggattgtcagct

SEQ ID NO: 33366 - DNA, 18 bp, synthetic construct
  source 1..18: mol_type = other DNA
tgctgatggattgtcagc

SEQ ID NO: 33367 - DNA, 18 bp, synthetic construct
  source 1..18: mol_type = other DNA
atgctgatggattgtcag

SEQ ID NO: 33368 - DNA, 18 bp, synthetic construct
  source 1..18: mol_type = other DNA
catgctgatggattgtca

SEQ ID NO: 33369 - DNA, 18 bp, synthetic construct
  source 1..18: mol_type = other DNA
acatgctgatggattgtc

SEQ ID NO: 33370 - DNA, 18 bp, synthetic construct
  source 1..18: mol_type = other DNA
gacatgctgatggattgt

SEQ ID NO: 33371 - DNA, 18 bp, synthetic construct
  source 1..18: mol_type = other DNA
ggacatgctgatggattg

SEQ ID NO: 33372 - DNA, 18 bp, synthetic construct
  source 1..18: mol_type = other DNA
tggacatgctgatggatt

SEQ ID NO: 33373 - DNA, 18 bp, synthetic construct
  source 1..18: mol_type = other DNA
ctggacatgctgatggat

SEQ ID NO: 33374 - DNA, 18 bp, synthetic construct
  source 1..18: mol_type = other DNA
cctggacatgctgatgga

SEQ ID NO: 33375 - DNA, 18 bp, synthetic construct
  source 1..18: mol_type = other DNA
tcctggacatgctgatgg

SEQ ID NO: 33376 - DNA, 18 bp, synthetic construct
  source 1..18: mol_type = other DNA
ctcctggacatgctgatg

SEQ ID NO: 33377 - DNA, 18 bp, synthetic construct
  source 1..18: mol_type = other DNA
cctcctggacatgctgat

SEQ ID NO: 33378 - DNA, 18 bp, synthetic construct
  source 1..18: mol_type = other DNA
tcctcctggacatgctga

SEQ ID NO: 33379 - DNA, 18 bp, synthetic construct
  source 1..18: mol_type = other DNA
ttcctcctggacatgctg

SEQ ID NO: 33380 - DNA, 18 bp, synthetic construct
  source 1..18: mol_type = other DNA
tttcctcctggacatgct

SEQ ID NO: 33381 - DNA, 18 bp, synthetic construct
  source 1..18: mol_type = other DNA
ttttcctcctggacatgc

SEQ ID NO: 33382 - DNA, 18 bp, synthetic construct
  source 1..18: mol_type = other DNA
attttcctcctggacatg

SEQ ID NO: 33383 - DNA, 18 bp, synthetic construct
  source 1..18: mol_type = other DNA
tattttcctcctggacat

SEQ ID NO: 33384 - DNA, 18 bp, synthetic construct
  source 1..18: mol_type = other DNA
ttattttcctcctggaca

SEQ ID NO: 33385 - DNA, 18 bp, synthetic construct
  source 1..18: mol_type = other DNA
cttattttcctcctggac

SEQ ID NO: 33386 - DNA, 18 bp, synthetic construct
  source 1..18: mol_type = other DNA
ccttattttcctcctgga

SEQ ID NO: 33387 - DNA, 18 bp, synthetic construct
  source 1..18: mol_type = other DNA
tccttattttcctcctgg

SEQ ID NO: 33388 - DNA, 18 bp, synthetic construct
  source 1..18: mol_type = other DNA
ctccttattttcctcctg

SEQ ID NO: 33389 - DNA, 18 bp, synthetic construct
  source 1..18: mol_type = other DNA
cctccttattttcctcct

SEQ ID NO: 33390 - DNA, 18 bp, synthetic construct
  source 1..18: mol_type = other DNA
tcctccttattttcctcc

SEQ ID NO: 33391 - DNA, 18 bp, synthetic construct
  source 1..18: mol_type = other DNA
ctcctccttattttcctc

SEQ ID NO: 33392 - DNA, 18 bp, synthetic construct
  source 1..18: mol_type = other DNA
cctcctccttattttcct

SEQ ID NO: 33393 - DNA, 18 bp, synthetic construct
  source 1..18: mol_type = other DNA
tcctcctccttattttcc

SEQ ID NO: 33394 - DNA, 18 bp, synthetic construct
  source 1..18: mol_type = other DNA
ctcctcctccttattttc

SEQ ID NO: 33395 - DNA, 18 bp, synthetic construct
  source 1..18: mol_type = other DNA
gctcctcctccttatttt

SEQ ID NO: 33396 - DNA, 18 bp, synthetic construct
  source 1..18: mol_type = other DNA
tgctcctcctccttattt

SEQ ID NO: 33397 - DNA, 18 bp, synthetic construct
  source 1..18: mol_type = other DNA
ctgctcctcctccttatt

SEQ ID NO: 33398 - DNA, 18 bp, synthetic construct
  source 1..18: mol_type = other DNA
tctgctcctcctccttat

SEQ ID NO: 33399 - DNA, 18 bp, synthetic construct
  source 1..18: mol_type = other DNA
tatttctgctcctcctcc

SEQ ID NO: 33400 - DNA, 18 bp, synthetic construct
  source 1..18: mol_type = other DNA
ctatttctgctcctcctc

SEQ ID NO: 33401 - DNA, 18 bp, synthetic construct
  source 1..18: mol_type = other DNA
tctatttctgctcctcct

SEQ ID NO: 33402 - DNA, 18 bp, synthetic construct
  source 1..18: mol_type = other DNA
atctatttctgctcctcc

SEQ ID NO: 33403 - DNA, 18 bp, synthetic construct
  source 1..18: mol_type = other DNA
catctatttctgctcctc

SEQ ID NO: 33404 - DNA, 18 bp, synthetic construct
  source 1..18: mol_type = other DNA
tcatctatttctgctcct

SEQ ID NO: 33405 - DNA, 18 bp, synthetic construct
  source 1..18: mol_type = other DNA
ctcatctatttctgctcc

SEQ ID NO: 33406 - DNA, 18 bp, synthetic construct
  source 1..18: mol_type = other DNA
cctcatctatttctgctc

SEQ ID NO: 33407 - DNA, 18 bp, synthetic construct
  source 1..18: mol_type = other DNA
gcctcatctatttctgct

SEQ ID NO: 33408 - DNA, 18 bp, synthetic construct
  source 1..18: mol_type = other DNA
agcctcatctatttctgc

SEQ ID NO: 33409 - DNA, 18 bp, synthetic construct
  source 1..18: mol_type = other DNA
cagcctcatctatttctg

SEQ ID NO: 33410 - DNA, 18 bp, synthetic construct
  source 1..18: mol_type = other DNA
ccagcctcatctatttct

SEQ ID NO: 33411 - DNA, 18 bp, synthetic construct
  source 1..18: mol_type = other DNA
tccagcctcatctatttc

SEQ ID NO: 33412 - DNA, 18 bp, synthetic construct
  source 1..18: mol_type = other DNA
atccagcctcatctattt

SEQ ID NO: 33413 - DNA, 18 bp, synthetic construct
  source 1..18: mol_type = other DNA
tatccagcctcatctatt

SEQ ID NO: 33414 - DNA, 18 bp, synthetic construct
  source 1..18: mol_type = other DNA
atatccagcctcatctat

SEQ ID NO: 33415 - DNA, 18 bp, synthetic construct
  source 1..18: mol_type = other DNA
tatatccagcctcatcta

SEQ ID NO: 33416 - DNA, 18 bp, synthetic construct
  source 1..18: mol_type = other DNA
ctatatccagcctcatct

SEQ ID NO: 33417 - DNA, 18 bp, synthetic construct
  source 1..18: mol_type = other DNA
tctatatccagcctcatc

SEQ ID NO: 33418 - DNA, 18 bp, synthetic construct
  source 1..18: mol_type = other DNA
ttctatatccagcctcat

SEQ ID NO: 33419 - DNA, 18 bp, synthetic construct
  source 1..18: mol_type = other DNA
cttctatatccagcctca

SEQ ID NO: 33420 - DNA, 18 bp, synthetic construct
  source 1..18: mol_type = other DNA
gcttctatatccagcctc

SEQ ID NO: 33421 - DNA, 18 bp, synthetic construct
  source 1..18: mol_type = other DNA
tgcttctatatccagcct

SEQ ID NO: 33422 - DNA, 18 bp, synthetic construct
  source 1..18: mol_type = other DNA
ctgcttctatatccagcc

SEQ ID NO: 33423 - DNA, 18 bp, synthetic construct
  source 1..18: mol_type = other DNA
cctgcttctatatccagc

SEQ ID NO: 33424 - DNA, 18 bp, synthetic construct
  source 1..18: mol_type = other DNA
ccctgcttctatatccag

SEQ ID NO: 33425 - DNA, 18 bp, synthetic construct
  source 1..18: mol_type = other DNA
gccctgcttctatatcca

SEQ ID NO: 33426 - DNA, 18 bp, synthetic construct
  source 1..18: mol_type = other DNA
agccctgcttctatatcc

SEQ ID NO: 33427 - DNA, 18 bp, synthetic construct
  source 1..18: mol_type = other DNA
cagccctgcttctatatc

SEQ ID NO: 33428 - DNA, 18 bp, synthetic construct
  source 1..18: mol_type = other DNA
tcagccctgcttctatat

SEQ ID NO: 33429 - DNA, 18 bp, synthetic construct
  source 1..18: mol_type = other DNA
ttcagccctgcttctata

SEQ ID NO: 33430 - DNA, 18 bp, synthetic construct
  source 1..18: mol_type = other DNA
cttcagccctgcttctat

SEQ ID NO: 33431 - DNA, 18 bp, synthetic construct
  source 1..18: mol_type = other DNA
aacacagcttcagccctg

SEQ ID NO: 33432 - DNA, 18 bp, synthetic construct
  source 1..18: mol_type = other DNA
caacacagcttcagccct

SEQ ID NO: 33433 - DNA, 18 bp, synthetic construct
  source 1..18: mol_type = other DNA
acaacacagcttcagccc

SEQ ID NO: 33434 - DNA, 18 bp, synthetic construct
  source 1..18: mol_type = other DNA
aacaacacagcttcagcc

SEQ ID NO: 33435 - DNA, 18 bp, synthetic construct
  source 1..18: mol_type = other DNA
aaacaacacagcttcagc

SEQ ID NO: 33436 - DNA, 18 bp, synthetic construct
  source 1..18: mol_type = other DNA
ccacaaacaacacagctt

SEQ ID NO: 33437 - DNA, 18 bp, synthetic construct
  source 1..18: mol_type = other DNA
accacaaacaacacagct

SEQ ID NO: 33438 - DNA, 18 bp, synthetic construct
  source 1..18: mol_type = other DNA
cacaactctttaccacaa

SEQ ID NO: 33439 - DNA, 18 bp, synthetic construct
  source 1..18: mol_type = other DNA
tcacaactctttaccaca

SEQ ID NO: 33440 - DNA, 18 bp, synthetic construct
  source 1..18: mol_type = other DNA
atcacaactctttaccac

SEQ ID NO: 33441 - DNA, 18 bp, synthetic construct
  source 1..18: mol_type = other DNA
ccttctggatagaatcac

SEQ ID NO: 33442 - DNA, 18 bp, synthetic construct
  source 1..18: mol_type = other DNA
gccttctggatagaatca

SEQ ID NO: 33443 - DNA, 18 bp, synthetic construct
  source 1..18: mol_type = other DNA
tgccttctggatagaatc

SEQ ID NO: 33444 - DNA, 18 bp, synthetic construct
  source 1..18: mol_type = other DNA
ttgccttctggatagaat

SEQ ID NO: 33445 - DNA, 18 bp, synthetic construct
  source 1..18: mol_type = other DNA
attgccttctggatagaa

SEQ ID NO: 33446 - DNA, 18 bp, synthetic construct
  source 1..18: mol_type = other DNA
tattgccttctggataga

SEQ ID NO: 33447 - DNA, 18 bp, synthetic construct
  source 1..18: mol_type = other DNA
ctattgccttctggatag

SEQ ID NO: 33448 - DNA, 18 bp, synthetic construct
  source 1..18: mol_type = other DNA
cctattgccttctggata

SEQ ID NO: 33449 - DNA, 18 bp, synthetic construct
  source 1..18: mol_type = other DNA
acctattgccttctggat

SEQ ID NO: 33450 - DNA, 18 bp, synthetic construct
  source 1..18: mol_type = other DNA
tacctattgccttctgga

SEQ ID NO: 33451 - DNA, 18 bp, synthetic construct
  source 1..18: mol_type = other DNA
ctacctattgccttctgg

SEQ ID NO: 33452 - DNA, 18 bp, synthetic construct
  source 1..18: mol_type = other DNA
gctacctattgccttctg

SEQ ID NO: 33453 - DNA, 18 bp, synthetic construct
  source 1..18: mol_type = other DNA
gccctttgcagaaaatat

SEQ ID NO: 33454 - DNA, 18 bp, synthetic construct
  source 1..18: mol_type = other DNA
agccctttgcagaaaata

SEQ ID NO: 33455 - DNA, 18 bp, synthetic construct
  source 1..18: mol_type = other DNA
tagccctttgcagaaaat

SEQ ID NO: 33456 - DNA, 18 bp, synthetic construct
  source 1..18: mol_type = other DNA
ttagccctttgcagaaaa

SEQ ID NO: 33457 - DNA, 18 bp, synthetic construct
  source 1..18: mol_type = other DNA
tttagccctttgcagaaa

SEQ ID NO: 33458 - DNA, 18 bp, synthetic construct
  source 1..18: mol_type = other DNA
atttagccctttgcagaa

SEQ ID NO: 33459 - DNA, 18 bp, synthetic construct
  source 1..18: mol_type = other DNA
catttagccctttgcaga

SEQ ID NO: 33460 - DNA, 18 bp, synthetic construct
  source 1..18: mol_type = other DNA
acatttagccctttgcag

SEQ ID NO: 33461 - DNA, 18 bp, synthetic construct
  source 1..18: mol_type = other DNA
aacatttagccctttgca

SEQ ID NO: 33462 - DNA, 18 bp, synthetic construct
  source 1..18: mol_type = other DNA
taacatttagccctttgc

SEQ ID NO: 33463 - DNA, 18 bp, synthetic construct
  source 1..18: mol_type = other DNA
ttaacatttagccctttg

SEQ ID NO: 33464 - DNA, 18 bp, synthetic construct
  source 1..18: mol_type = other DNA
tttaacatttagcccttt

SEQ ID NO: 33465 - DNA, 18 bp, synthetic construct
  source 1..18: mol_type = other DNA
atttaacatttagccctt

SEQ ID NO: 33466 - DNA, 18 bp, synthetic construct
  source 1..18: mol_type = other DNA
tatttaacatttagccct

SEQ ID NO: 33467 - DNA, 18 bp, synthetic construct
  source 1..18: mol_type = other DNA
gaccatatggcttggaaa

SEQ ID NO: 33468 - DNA, 18 bp, synthetic construct
  source 1..18: mol_type = other DNA
agaccatatggcttggaa

SEQ ID NO: 33469 - DNA, 18 bp, synthetic construct
  source 1..18: mol_type = other DNA
gagaccatatggcttgga

SEQ ID NO: 33470 - DNA, 18 bp, synthetic construct
  source 1..18: mol_type = other DNA
agagaccatatggcttgg

SEQ ID NO: 33471 - DNA, 18 bp, synthetic construct
  source 1..18: mol_type = other DNA
gagagaccatatggcttg

SEQ ID NO: 33472 - DNA, 18 bp, synthetic construct
  source 1..18: mol_type = other DNA
agagagaccatatggctt

SEQ ID NO: 33473 - DNA, 18 bp, synthetic construct
  source 1..18: mol_type = other DNA
gagagagaccatatggct

SEQ ID NO: 33474 - DNA, 18 bp, synthetic construct
  source 1..18: mol_type = other DNA
agagagagaccatatggc

SEQ ID NO: 33475 - DNA, 18 bp, synthetic construct
  source 1..18: mol_type = other DNA
gagagagagaccatatgg

SEQ ID NO: 33476 - DNA, 18 bp, synthetic construct
  source 1..18: mol_type = other DNA
cattgagagagagaccat

SEQ ID NO: 33477 - DNA, 18 bp, synthetic construct
  source 1..18: mol_type = other DNA
tcattgagagagagacca

SEQ ID NO: 33478 - DNA, 18 bp, synthetic construct
  source 1..18: mol_type = other DNA
gtcattgagagagagacc

SEQ ID NO: 33479 - DNA, 18 bp, synthetic construct
  source 1..18: mol_type = other DNA
agtcattgagagagagac

SEQ ID NO: 33480 - DNA, 18 bp, synthetic construct
  source 1..18: mol_type = other DNA
gagtcattgagagagaga

SEQ ID NO: 33481 - DNA, 18 bp, synthetic construct
  source 1..18: mol_type = other DNA
tgagtcattgagagagag

SEQ ID NO: 33482 - DNA, 18 bp, synthetic construct
  source 1..18: mol_type = other DNA
ctgagtcattgagagaga

SEQ ID NO: 33483 - DNA, 18 bp, synthetic construct
  source 1..18: mol_type = other DNA
gctgagtcattgagagag

SEQ ID NO: 33484 - DNA, 18 bp, synthetic construct
  source 1..18: mol_type = other DNA
agctgagtcattgagaga

SEQ ID NO: 33485 - DNA, 18 bp, synthetic construct
  source 1..18: mol_type = other DNA
gagctgagtcattgagag

SEQ ID NO: 33486 - DNA, 18 bp, synthetic construct
  source 1..18: mol_type = other DNA
agagctgagtcattgaga

SEQ ID NO: 33487 - DNA, 18 bp, synthetic construct
  source 1..18: mol_type = other DNA
aagagctgagtcattgag

SEQ ID NO: 33488 - DNA, 18 bp, synthetic construct
  source 1..18: mol_type = other DNA
gaagagctgagtcattga

SEQ ID NO: 33489 - DNA, 18 bp, synthetic construct
  source 1..18: mol_type = other DNA
ggaagagctgagtcattg

SEQ ID NO: 33490 - DNA, 18 bp, synthetic construct
  source 1..18: mol_type = other DNA
tggaagagctgagtcatt

SEQ ID NO: 33491 - DNA, 18 bp, synthetic construct
  source 1..18: mol_type = other DNA
atggaagagctgagtcat

SEQ ID NO: 33492 - DNA, 18 bp, synthetic construct
  source 1..18: mol_type = other DNA
aatggaagagctgagtca

SEQ ID NO: 33493 - DNA, 18 bp, synthetic construct
  source 1..18: mol_type = other DNA
taatggaagagctgagtc

SEQ ID NO: 33494 - DNA, 18 bp, synthetic construct
  source 1..18: mol_type = other DNA
gctactttcatggtataa

SEQ ID NO: 33495 - DNA, 18 bp, synthetic construct
  source 1..18: mol_type = other DNA
ggctactttcatggtata

SEQ ID NO: 33496 - DNA, 18 bp, synthetic construct
  source 1..18: mol_type = other DNA
tggctactttcatggtat

SEQ ID NO: 33497 - DNA, 18 bp, synthetic construct
  source 1..18: mol_type = other DNA
ctggctactttcatggta

SEQ ID NO: 33498 - DNA, 18 bp, synthetic construct
  source 1..18: mol_type = other DNA
tctggctactttcatggt

SEQ ID NO: 33499 - DNA, 18 bp, synthetic construct
  source 1..18: mol_type = other DNA
ctctggctactttcatgg

SEQ ID NO: 33500 - DNA, 18 bp, synthetic construct
  source 1..18: mol_type = other DNA
tctctggctactttcatg

SEQ ID NO: 33501 - DNA, 18 bp, synthetic construct
  source 1..18: mol_type = other DNA
gtctctggctactttcat

SEQ ID NO: 33502 - DNA, 18 bp, synthetic construct
  source 1..18: mol_type = other DNA
cgtctctggctactttca

SEQ ID NO: 33503 - DNA, 18 bp, synthetic construct
  source 1..18: mol_type = other DNA
tgacacagtctgcgtttg

SEQ ID NO: 33504 - DNA, 18 bp, synthetic construct
  source 1..18: mol_type = other DNA
ctgacacagtctgcgttt

SEQ ID NO: 33505 - DNA, 18 bp, synthetic construct
  source 1..18: mol_type = other DNA
tctgacacagtctgcgtt

SEQ ID NO: 33506 - DNA, 18 bp, synthetic construct
  source 1..18: mol_type = other DNA
gtctgacacagtctgcgt

SEQ ID NO: 33507 - DNA, 18 bp, synthetic construct
  source 1..18: mol_type = other DNA
tgtctgacacagtctgcg

SEQ ID NO: 33508 - DNA, 18 bp, synthetic construct
  source 1..18: mol_type = other DNA
atgtctgacacagtctgc

SEQ ID NO: 33509 - DNA, 18 bp, synthetic construct
  source 1..18: mol_type = other DNA
tatgtctgacacagtctg

SEQ ID NO: 33510 - DNA, 18 bp, synthetic construct
  source 1..18: mol_type = other DNA
ctatgtctgacacagtct

SEQ ID NO: 33511 - DNA, 18 bp, synthetic construct
  source 1..18: mol_type = other DNA
actatgtctgacacagtc

SEQ ID NO: 33512 - DNA, 18 bp, synthetic construct
  source 1..18: mol_type = other DNA
gactatgtctgacacagt

SEQ ID NO: 33513 - DNA, 18 bp, synthetic construct
  source 1..18: mol_type = other DNA
ggactatgtctgacacag

SEQ ID NO: 33514 - DNA, 18 bp, synthetic construct
  source 1..18: mol_type = other DNA
tggactatgtctgacaca

SEQ ID NO: 33515 - DNA, 18 bp, synthetic construct
  source 1..18: mol_type = other DNA
atggactatgtctgacac

SEQ ID NO: 33516 - DNA, 18 bp, synthetic construct
  source 1..18: mol_type = other DNA
catggactatgtctgaca

SEQ ID NO: 33517 - DNA, 18 bp, synthetic construct
  source 1..18: mol_type = other DNA
acatggactatgtctgac

SEQ ID NO: 33518 - DNA, 18 bp, synthetic construct
  source 1..18: mol_type = other DNA
tacatggactatgtctga

SEQ ID NO: 33519 - DNA, 18 bp, synthetic construct
  source 1..18: mol_type = other DNA
atacatggactatgtctg

SEQ ID NO: 33520 - DNA, 18 bp, synthetic construct
  source 1..18: mol_type = other DNA
catacatggactatgtct

SEQ ID NO: 33521 - DNA, 18 bp, synthetic construct
  source 1..18: mol_type = other DNA
ccatacatggactatgtc

SEQ ID NO: 33522 - DNA, 18 bp, synthetic construct
  source 1..18: mol_type = other DNA
accatacatggactatgt

SEQ ID NO: 33523 - DNA, 18 bp, synthetic construct
  source 1..18: mol_type = other DNA
ctaccatacatggactat

SEQ ID NO: 33524 - DNA, 18 bp, synthetic construct
  source 1..18: mol_type = other DNA
actaccatacatggacta

SEQ ID NO: 33525 - DNA, 18 bp, synthetic construct
  source 1..18: mol_type = other DNA
cctgagctttctaaaaca

SEQ ID NO: 33526 - DNA, 18 bp, synthetic construct
  source 1..18: mol_type = other DNA
cataaacctgagctttct

SEQ ID NO: 33527 - DNA, 18 bp, synthetic construct
  source 1..18: mol_type = other DNA
tcataaacctgagctttc

SEQ ID NO: 33528 - DNA, 18 bp, synthetic construct
  source 1..18: mol_type = other DNA
catcataaacctgagctt

SEQ ID NO: 33529 - DNA, 18 bp, synthetic construct
  source 1..18: mol_type = other DNA
acatcataaacctgagct

SEQ ID NO: 33530 - DNA, 18 bp, synthetic construct
  source 1..18: mol_type = other DNA
cacatcataaacctgagc

SEQ ID NO: 33531 - DNA, 18 bp, synthetic construct
  source 1..18: mol_type = other DNA
ccatcacatcataaacct

SEQ ID NO: 33532 - DNA, 18 bp, synthetic construct
  source 1..18: mol_type = other DNA
tccatcacatcataaacc

SEQ ID NO: 33533 - DNA, 18 bp, synthetic construct
  source 1..18: mol_type = other DNA
ttctccatcacatcataa

SEQ ID NO: 33534 - DNA, 18 bp, synthetic construct
  source 1..18: mol_type = other DNA
attctccatcacatcata

SEQ ID NO: 33535 - DNA, 18 bp, synthetic construct
  source 1..18: mol_type = other DNA
aattctccatcacatcat

SEQ ID NO: 33536 - DNA, 18 bp, synthetic construct
  source 1..18: mol_type = other DNA
gaattctccatcacatca

SEQ ID NO: 33537 - DNA, 18 bp, synthetic construct
  source 1..18: mol_type = other DNA
ggaattctccatcacatc

SEQ ID NO: 33538 - DNA, 18 bp, synthetic construct
  source 1..18: mol_type = other DNA
aggaattctccatcacat

SEQ ID NO: 33539 - DNA, 18 bp, synthetic construct
  source 1..18: mol_type = other DNA
taggaattctccatcaca

SEQ ID NO: 33540 - DNA, 18 bp, synthetic construct
  source 1..18: mol_type = other DNA
gtaggaattctccatcac

SEQ ID NO: 33541 - DNA, 18 bp, synthetic construct
  source 1..18: mol_type = other DNA
tgtaggaattctccatca

SEQ ID NO: 33542 - DNA, 18 bp, synthetic construct
  source 1..18: mol_type = other DNA
ttgtaggaattctccatc

SEQ ID NO: 33543 - DNA, 18 bp, synthetic construct
  source 1..18: mol_type = other DNA
cttgtaggaattctccat

SEQ ID NO: 33544 - DNA, 18 bp, synthetic construct
  source 1..18: mol_type = other DNA
tcttgtaggaattctcca

SEQ ID NO: 33545 - DNA, 18 bp, synthetic construct
  source 1..18: mol_type = other DNA
ctcttgtaggaattctcc

SEQ ID NO: 33546 - DNA, 18 bp, synthetic construct
  source 1..18: mol_type = other DNA
actcttgtaggaattctc

SEQ ID NO: 33547 - DNA, 18 bp, synthetic construct
  source 1..18: mol_type = other DNA
gttcactctaccatttaa

SEQ ID NO: 33548 - DNA, 18 bp, synthetic construct
  source 1..18: mol_type = other DNA
tgttcactctaccattta

SEQ ID NO: 33549 - DNA, 18 bp, synthetic construct
  source 1..18: mol_type = other DNA
atgttcactctaccattt

SEQ ID NO: 33550 - DNA, 18 bp, synthetic construct
  source 1..18: mol_type = other DNA
tatgttcactctaccatt

SEQ ID NO: 33551 - DNA, 18 bp, synthetic construct
  source 1..18: mol_type = other DNA
gtatgttcactctaccat

SEQ ID NO: 33552 - DNA, 18 bp, synthetic construct
  source 1..18: mol_type = other DNA
tgtatgttcactctacca

SEQ ID NO: 33553 - DNA, 18 bp, synthetic construct
  source 1..18: mol_type = other DNA
gtgtatgttcactctacc

SEQ ID NO: 33554 - DNA, 18 bp, synthetic construct
  source 1..18: mol_type = other DNA
agtgtatgttcactctac

SEQ ID NO: 33555 - DNA, 18 bp, synthetic construct
  source 1..18: mol_type = other DNA
cagtgtatgttcactcta

SEQ ID NO: 33556 - DNA, 18 bp, synthetic construct
  source 1..18: mol_type = other DNA
ccagtgtatgttcactct

SEQ ID NO: 33557 - DNA, 18 bp, synthetic construct
  source 1..18: mol_type = other DNA
tccagtgtatgttcactc

SEQ ID NO: 33558 - DNA, 18 bp, synthetic construct
  source 1..18: mol_type = other DNA
ttccagtgtatgttcact

SEQ ID NO: 33559 - DNA, 18 bp, synthetic construct
  source 1..18: mol_type = other DNA
attccagtgtatgttcac

SEQ ID NO: 33560 - DNA, 18 bp, synthetic construct
  source 1..18: mol_type = other DNA
aattccagtgtatgttca

SEQ ID NO: 33561 - DNA, 18 bp, synthetic construct
  source 1..18: mol_type = other DNA
gaattccagtgtatgttc

SEQ ID NO: 33562 - DNA, 18 bp, synthetic construct
  source 1..18: mol_type = other DNA
agaattccagtgtatgtt

SEQ ID NO: 33563 - DNA, 18 bp, synthetic construct
  source 1..18: mol_type = other DNA
tagaattccagtgtatgt

SEQ ID NO: 33564 - DNA, 18 bp, synthetic construct
  source 1..18: mol_type = other DNA
gtatagaattccagtgta

SEQ ID NO: 33565 - DNA, 18 bp, synthetic construct
  source 1..18: mol_type = other DNA
agtatagaattccagtgt

SEQ ID NO: 33566 - DNA, 18 bp, synthetic construct
  source 1..18: mol_type = other DNA
gcagtatagaattccagt

SEQ ID NO: 33567 - DNA, 18 bp, synthetic construct
  source 1..18: mol_type = other DNA
agcagtatagaattccag

SEQ ID NO: 33568 - DNA, 18 bp, synthetic construct
  source 1..18: mol_type = other DNA
ggtcaagcagtatagaat

SEQ ID NO: 33569 - DNA, 18 bp, synthetic construct
  source 1..18: mol_type = other DNA
gggtcaagcagtatagaa

SEQ ID NO: 33570 - DNA, 18 bp, synthetic construct
  source 1..18: mol_type = other DNA
tgggtcaagcagtataga

SEQ ID NO: 33571 - DNA, 18 bp, synthetic construct
  source 1..18: mol_type = other DNA
ttgggtcaagcagtatag

SEQ ID NO: 33572 - DNA, 18 bp, synthetic construct
  source 1..18: mol_type = other DNA
cttgggtcaagcagtata

SEQ ID NO: 33573 - DNA, 18 bp, synthetic construct
  source 1..18: mol_type = other DNA
gcttgggtcaagcagtat

SEQ ID NO: 33574 - DNA, 18 bp, synthetic construct
  source 1..18: mol_type = other DNA
agcttgggtcaagcagta

SEQ ID NO: 33575 - DNA, 18 bp, synthetic construct
  source 1..18: mol_type = other DNA
aagcttgggtcaagcagt

SEQ ID NO: 33576 - DNA, 18 bp, synthetic construct
  source 1..18: mol_type = other DNA
aaagcttgggtcaagcag

SEQ ID NO: 33577 - DNA, 18 bp, synthetic construct
  source 1..18: mol_type = other DNA
aaaagcttgggtcaagca

SEQ ID NO: 33578 - DNA, 18 bp, synthetic construct
  source 1..18: mol_type = other DNA
caaaagcttgggtcaagc

SEQ ID NO: 33579 - DNA, 18 bp, synthetic construct
  source 1..18: mol_type = other DNA
tatcaaaagcttgggtca

SEQ ID NO: 33580 - DNA, 18 bp, synthetic construct
  source 1..18: mol_type = other DNA
ctatcaaaagcttgggtc

SEQ ID NO: 33581 - DNA, 18 bp, synthetic construct
  source 1..18: mol_type = other DNA
gctatcaaaagcttgggt

SEQ ID NO: 33582 - DNA, 18 bp, synthetic construct
  source 1..18: mol_type = other DNA
tgctatcaaaagcttggg

SEQ ID NO: 33583 - DNA, 18 bp, synthetic construct
  source 1..18: mol_type = other DNA
ccttttgctatcaaaagc

SEQ ID NO: 33584 - DNA, 18 bp, synthetic construct
  source 1..18: mol_type = other DNA
ctaccttttgctatcaaa

SEQ ID NO: 33585 - DNA, 18 bp, synthetic construct
  source 1..18: mol_type = other DNA
tctaccttttgctatcaa

SEQ ID NO: 33586 - DNA, 18 bp, synthetic construct
  source 1..18: mol_type = other DNA
ttctaccttttgctatca

SEQ ID NO: 33587 - DNA, 18 bp, synthetic construct
  source 1..18: mol_type = other DNA
tttctaccttttgctatc

SEQ ID NO: 33588 - DNA, 18 bp, synthetic construct
  source 1..18: mol_type = other DNA
ttttctaccttttgctat

SEQ ID NO: 33589 - DNA, 18 bp, synthetic construct
  source 1..18: mol_type = other DNA
cttttctaccttttgcta

SEQ ID NO: 33590 - DNA, 18 bp, synthetic construct
  source 1..18: mol_type = other DNA
tcttttctaccttttgct

SEQ ID NO: 33591 - DNA, 18 bp, synthetic construct
  source 1..18: mol_type = other DNA
gtcttttctaccttttgc

SEQ ID NO: 33592 - DNA, 18 bp, synthetic construct
  source 1..18: mol_type = other DNA
tgtcttttctaccttttg

SEQ ID NO: 33593 - DNA, 18 bp, synthetic construct
  source 1..18: mol_type = other DNA
ctgtcttttctacctttt

SEQ ID NO: 33594 - DNA, 18 bp, synthetic construct
  source 1..18: mol_type = other DNA
tctgtcttttctaccttt

SEQ ID NO: 33595 - DNA, 18 bp, synthetic construct
  source 1..18: mol_type = other DNA
atctgtcttttctacctt

SEQ ID NO: 33596 - DNA, 18 bp, synthetic construct
  source 1..18: mol_type = other DNA
acaccctgagctatgact

SEQ ID NO: 33597 - DNA, 18 bp, synthetic construct
  source 1..18: mol_type = other DNA
aacaccctgagctatgac

SEQ ID NO: 33598 - DNA, 18 bp, synthetic construct
  source 1..18: mol_type = other DNA
aaacaccctgagctatga

SEQ ID NO: 33599 - DNA, 18 bp, synthetic construct
  source 1..18: mol_type = other DNA
caaacaccctgagctatg

SEQ ID NO: 33600 - DNA, 18 bp, synthetic construct
  source 1..18: mol_type = other DNA
tcaaacaccctgagctat

SEQ ID NO: 33601 - DNA, 18 bp, synthetic construct
  source 1..18: mol_type = other DNA
gtcaaacaccctgagcta

SEQ ID NO: 33602 - DNA, 18 bp, synthetic construct
  source 1..18: mol_type = other DNA
agtcaaacaccctgagct

SEQ ID NO: 33603 - DNA, 18 bp, synthetic construct
  source 1..18: mol_type = other DNA
aagtcaaacaccctgagc

SEQ ID NO: 33604 - DNA, 18 bp, synthetic construct
  source 1..18: mol_type = other DNA
gaagtcaaacaccctgag

SEQ ID NO: 33605 - DNA, 18 bp, synthetic construct
  source 1..18: mol_type = other DNA
agaagtcaaacaccctga

SEQ ID NO: 33606 - DNA, 18 bp, synthetic construct
  source 1..18: mol_type = other DNA
gaagaagtcaaacaccct

SEQ ID NO: 33607 - DNA, 18 bp, synthetic construct
  source 1..18: mol_type = other DNA
ggaagaagtcaaacaccc

SEQ ID NO: 33608 - DNA, 18 bp, synthetic construct
  source 1..18: mol_type = other DNA
ccccacagaaaagcaaac

SEQ ID NO: 33609 - DNA, 18 bp, synthetic construct
  source 1..18: mol_type = other DNA
accccacagaaaagcaaa

SEQ ID NO: 33610 - DNA, 18 bp, synthetic construct
  source 1..18: mol_type = other DNA
aaccccacagaaaagcaa

SEQ ID NO: 33611 - DNA, 18 bp, synthetic construct
  source 1..18: mol_type = other DNA
aaaccccacagaaaagca

SEQ ID NO: 33612 - DNA, 18 bp, synthetic construct
  source 1..18: mol_type = other DNA
aggctgctgtgacaaaaa

SEQ ID NO: 33613 - DNA, 18 bp, synthetic construct
  source 1..18: mol_type = other DNA
aaggctgctgtgacaaaa

SEQ ID NO: 33614 - DNA, 18 bp, synthetic construct
  source 1..18: mol_type = other DNA
aaaggctgctgtgacaaa

SEQ ID NO: 33615 - DNA, 18 bp, synthetic construct
  source 1..18: mol_type = other DNA
caaaggctgctgtgacaa

SEQ ID NO: 33616 - DNA, 18 bp, synthetic construct
  source 1..18: mol_type = other DNA
acaaaggctgctgtgaca

SEQ ID NO: 33617 - DNA, 18 bp, synthetic construct
  source 1..18: mol_type = other DNA
gacaaaggctgctgtgac

SEQ ID NO: 33618 - DNA, 18 bp, synthetic construct
  source 1..18: mol_type = other DNA
cgacaaaggctgctgtga

SEQ ID NO: 33619 - DNA, 18 bp, synthetic construct
  source 1..18: mol_type = other DNA
gcgacaaaggctgctgtg

SEQ ID NO: 33620 - DNA, 18 bp, synthetic construct
  source 1..18: mol_type = other DNA
agcgacaaaggctgctgt

SEQ ID NO: 33621 - DNA, 18 bp, synthetic construct
  source 1..18: mol_type = other DNA
aagcgacaaaggctgctg

SEQ ID NO: 33622 - DNA, 18 bp, synthetic construct
  source 1..18: mol_type = other DNA
gaagcgacaaaggctgct

SEQ ID NO: 33623 - DNA, 18 bp, synthetic construct
  source 1..18: mol_type = other DNA
tgaagcgacaaaggctgc

SEQ ID NO: 33624 - DNA, 18 bp, synthetic construct
  source 1..18: mol_type = other DNA
ttgaagcgacaaaggctg

SEQ ID NO: 33625 - DNA, 18 bp, synthetic construct
  source 1..18: mol_type = other DNA
tttgaagcgacaaaggct

SEQ ID NO: 33626 - DNA, 18 bp, synthetic construct
  source 1..18: mol_type = other DNA
gtttgaagcgacaaaggc

SEQ ID NO: 33627 - DNA, 18 bp, synthetic construct
  source 1..18: mol_type = other DNA
ggtgtttgaagcgacaaa

SEQ ID NO: 33628 - DNA, 18 bp, synthetic construct
  source 1..18: mol_type = other DNA
cggtgtttgaagcgacaa

SEQ ID NO: 33629 - DNA, 18 bp, synthetic construct
  source 1..18: mol_type = other DNA
gcggtgtttgaagcgaca

SEQ ID NO: 33630 - DNA, 18 bp, synthetic construct
  source 1..18: mol_type = other DNA
tgcggtgtttgaagcgac

SEQ ID NO: 33631 - DNA, 18 bp, synthetic construct
  source 1..18: mol_type = other DNA
ttgcggtgtttgaagcga

SEQ ID NO: 33632 - DNA, 18 bp, synthetic construct
  source 1..18: mol_type = other DNA
cttgcggtgtttgaagcg

SEQ ID NO: 33633 - DNA, 18 bp, synthetic construct
  source 1..18: mol_type = other DNA
acttgcggtgtttgaagc

SEQ ID NO: 33634 - DNA, 18 bp, synthetic construct
  source 1..18: mol_type = other DNA
cacttgcggtgtttgaag

SEQ ID NO: 33635 - DNA, 18 bp, synthetic construct
  source 1..18: mol_type = other DNA
acacttgcggtgtttgaa

SEQ ID NO: 33636 - DNA, 18 bp, synthetic construct
  source 1..18: mol_type = other DNA
aacacttgcggtgtttga

SEQ ID NO: 33637 - DNA, 18 bp, synthetic construct
  source 1..18: mol_type = other DNA
gaacacttgcggtgtttg

SEQ ID NO: 33638 - DNA, 18 bp, synthetic construct
  source 1..18: mol_type = other DNA
agaacacttgcggtgttt

SEQ ID NO: 33639 - DNA, 18 bp, synthetic construct
  source 1..18: mol_type = other DNA
aagaacacttgcggtgtt

SEQ ID NO: 33640 - DNA, 18 bp, synthetic construct
  source 1..18: mol_type = other DNA
aaagaacacttgcggtgt

SEQ ID NO: 33641 - DNA, 18 bp, synthetic construct
  source 1..18: mol_type = other DNA
gcatttcacttgaaaggt

SEQ ID NO: 33642 - DNA, 18 bp, synthetic construct
  source 1..18: mol_type = other DNA
tgttgcatttcacttgaa

SEQ ID NO: 33643 - DNA, 18 bp, synthetic construct
  source 1..18: mol_type = other DNA
atgttgcatttcacttga

SEQ ID NO: 33644 - DNA, 18 bp, synthetic construct
  source 1..18: mol_type = other DNA
catgttgcatttcacttg

SEQ ID NO: 33645 - DNA, 18 bp, synthetic construct
  source 1..18: mol_type = other DNA
acatgttgcatttcactt

SEQ ID NO: 33646 - DNA, 18 bp, synthetic construct
  source 1..18: mol_type = other DNA
gacatgttgcatttcact

SEQ ID NO: 33647 - DNA, 18 bp, synthetic construct
  source 1..18: mol_type = other DNA
agacatgttgcatttcac

SEQ ID NO: 33648 - DNA, 18 bp, synthetic construct
  source 1..18: mol_type = other DNA
cagacatgttgcatttca

SEQ ID NO: 33649 - DNA, 18 bp, synthetic construct
  source 1..18: mol_type = other DNA
tcagacatgttgcatttc

SEQ ID NO: 33650 - DNA, 18 bp, synthetic construct
  source 1..18: mol_type = other DNA
ttcagacatgttgcattt

SEQ ID NO: 33651 - DNA, 18 bp, synthetic construct
  source 1..18: mol_type = other DNA
tttcagacatgttgcatt

SEQ ID NO: 33652 - DNA, 18 bp, synthetic construct
  source 1..18: mol_type = other DNA
gtttcagacatgttgcat

SEQ ID NO: 33653 - DNA, 18 bp, synthetic construct
  source 1..18: mol_type = other DNA
cgtttcagacatgttgca

SEQ ID NO: 33654 - DNA, 18 bp, synthetic construct
  source 1..18: mol_type = other DNA
acgtttcagacatgttgc

SEQ ID NO: 33655 - DNA, 18 bp, synthetic construct
  source 1..18: mol_type = other DNA
cacgtttcagacatgttg

SEQ ID NO: 33656 - DNA, 18 bp, synthetic construct
  source 1..18: mol_type = other DNA
ccacgtttcagacatgtt

SEQ ID NO: 33657 - DNA, 18 bp, synthetic construct
  source 1..18: mol_type = other DNA
accacgtttcagacatgt

SEQ ID NO: 33658 - DNA, 18 bp, synthetic construct
  source 1..18: mol_type = other DNA
taccacgtttcagacatg

SEQ ID NO: 33659 - DNA, 18 bp, synthetic construct
  source 1..18: mol_type = other DNA
ataccacgtttcagacat

SEQ ID NO: 33660 - DNA, 18 bp, synthetic construct
  source 1..18: mol_type = other DNA
gataccacgtttcagaca

SEQ ID NO: 33661 - DNA, 18 bp, synthetic construct
  source 1..18: mol_type = other DNA
agataccacgtttcagac

SEQ ID NO: 33662 - DNA, 18 bp, synthetic construct
  source 1..18: mol_type = other DNA
cagataccacgtttcaga

SEQ ID NO: 33663 - DNA, 18 bp, synthetic construct
  source 1..18: mol_type = other DNA
ccagataccacgtttcag

SEQ ID NO: 33664 - DNA, 18 bp, synthetic construct
  source 1..18: mol_type = other DNA
tccagataccacgtttca

SEQ ID NO: 33665 - DNA, 18 bp, synthetic construct
  source 1..18: mol_type = other DNA
ctccagataccacgtttc

SEQ ID NO: 33666 - DNA, 18 bp, synthetic construct
  source 1..18: mol_type = other DNA
tctccagataccacgttt

SEQ ID NO: 33667 - DNA, 18 bp, synthetic construct
  source 1..18: mol_type = other DNA
ctctccagataccacgtt

SEQ ID NO: 33668 - DNA, 18 bp, synthetic construct
  source 1..18: mol_type = other DNA
cctctccagataccacgt

SEQ ID NO: 33669 - DNA, 18 bp, synthetic construct
  source 1..18: mol_type = other DNA
acctctccagataccacg

SEQ ID NO: 33670 - DNA, 18 bp, synthetic construct
  source 1..18: mol_type = other DNA
cacctctccagataccac

SEQ ID NO: 33671 - DNA, 18 bp, synthetic construct
  source 1..18: mol_type = other DNA
tcacctctccagatacca

SEQ ID NO: 33672 - DNA, 18 bp, synthetic construct
  source 1..18: mol_type = other DNA
ctcacctctccagatacc

SEQ ID NO: 33673 - DNA, 18 bp, synthetic construct
  source 1..18: mol_type = other DNA
tctcacctctccagatac

SEQ ID NO: 33674 - DNA, 18 bp, synthetic construct
  source 1..18: mol_type = other DNA
atctcacctctccagata

SEQ ID NO: 33675 - DNA, 18 bp, synthetic construct
  source 1..18: mol_type = other DNA
catctcacctctccagat

SEQ ID NO: 33676 - DNA, 18 bp, synthetic construct
  source 1..18: mol_type = other DNA
ccatctcacctctccaga

SEQ ID NO: 33677 - DNA, 18 bp, synthetic construct
  source 1..18: mol_type = other DNA
tccatctcacctctccag

SEQ ID NO: 33678 - DNA, 18 bp, synthetic construct
  source 1..18: mol_type = other DNA
tgtccatctcacctctcc

SEQ ID NO: 33679 - DNA, 18 bp, synthetic construct
  source 1..18: mol_type = other DNA
ttgtccatctcacctctc

SEQ ID NO: 33680 - DNA, 18 bp, synthetic construct
  source 1..18: mol_type = other DNA
tttgtccatctcacctct

SEQ ID NO: 33681 - DNA, 18 bp, synthetic construct
  source 1..18: mol_type = other DNA
ctttgtccatctcacctc

SEQ ID NO: 33682 - DNA, 18 bp, synthetic construct
  source 1..18: mol_type = other DNA
cctttgtccatctcacct

SEQ ID NO: 33683 - DNA, 18 bp, synthetic construct
  source 1..18: mol_type = other DNA
tcctttgtccatctcacc

SEQ ID NO: 33684 - DNA, 18 bp, synthetic construct
  source 1..18: mol_type = other DNA
ctcctttgtccatctcac

SEQ ID NO: 33685 - DNA, 18 bp, synthetic construct
  source 1..18: mol_type = other DNA
gctcctttgtccatctca

SEQ ID NO: 33686 - DNA, 18 bp, synthetic construct
  source 1..18: mol_type = other DNA
agggctcctttgtccatc

SEQ ID NO: 33687 - DNA, 18 bp, synthetic construct
  source 1..18: mol_type = other DNA
aagggctcctttgtccat

SEQ ID NO: 33688 - DNA, 18 bp, synthetic construct
  source 1..18: mol_type = other DNA
caagggctcctttgtcca

SEQ ID NO: 33689 - DNA, 18 bp, synthetic construct
  source 1..18: mol_type = other DNA
acaagggctcctttgtcc

SEQ ID NO: 33690 - DNA, 18 bp, synthetic construct
  source 1..18: mol_type = other DNA
aacaagggctcctttgtc

SEQ ID NO: 33691 - DNA, 18 bp, synthetic construct
  source 1..18: mol_type = other DNA
taacaagggctcctttgt

SEQ ID NO: 33692 - DNA, 18 bp, synthetic construct
  source 1..18: mol_type = other DNA
gtaacaagggctcctttg

SEQ ID NO: 33693 - DNA, 18 bp, synthetic construct
  source 1..18: mol_type = other DNA
agtaacaagggctccttt

SEQ ID NO: 33694 - DNA, 18 bp, synthetic construct
  source 1..18: mol_type = other DNA
cagtaacaagggctcctt

SEQ ID NO: 33695 - DNA, 18 bp, synthetic construct
  source 1..18: mol_type = other DNA
gcagtaacaagggctcct

SEQ ID NO: 33696 - DNA, 18 bp, synthetic construct
  source 1..18: mol_type = other DNA
tgcagtaacaagggctcc

SEQ ID NO: 33697 - DNA, 18 bp, synthetic construct
  source 1..18: mol_type = other DNA
gtgcagtaacaagggctc

SEQ ID NO: 33698 - DNA, 18 bp, synthetic construct
  source 1..18: mol_type = other DNA
cgtgcagtaacaagggct

SEQ ID NO: 33699 - DNA, 18 bp, synthetic construct
  source 1..18: mol_type = other DNA
acgtgcagtaacaagggc

SEQ ID NO: 33700 - DNA, 18 bp, synthetic construct
  source 1..18: mol_type = other DNA
aacgtgcagtaacaaggg

SEQ ID NO: 33701 - DNA, 18 bp, synthetic construct
  source 1..18: mol_type = other DNA
caaggtgaagtttggaga

SEQ ID NO: 33702 - DNA, 18 bp, synthetic construct
  source 1..18: mol_type = other DNA
gcaaggtgaagtttggag

SEQ ID NO: 33703 - DNA, 18 bp, synthetic construct
  source 1..18: mol_type = other DNA
tgcaaggtgaagtttgga

SEQ ID NO: 33704 - DNA, 18 bp, synthetic construct
  source 1..18: mol_type = other DNA
gtgcaaggtgaagtttgg

SEQ ID NO: 33705 - DNA, 18 bp, synthetic construct
  source 1..18: mol_type = other DNA
tgtgcaaggtgaagtttg

SEQ ID NO: 33706 - DNA, 18 bp, synthetic construct
  source 1..18: mol_type = other DNA
gtgtgcaaggtgaagttt

SEQ ID NO: 33707 - DNA, 18 bp, synthetic construct
  source 1..18: mol_type = other DNA
tgtgtgcaaggtgaagtt

SEQ ID NO: 33708 - DNA, 18 bp, synthetic construct
  source 1..18: mol_type = other DNA
ctgtgtgcaaggtgaagt

SEQ ID NO: 33709 - DNA, 18 bp, synthetic construct
  source 1..18: mol_type = other DNA
actgtgtgcaaggtgaag

SEQ ID NO: 33710 - DNA, 18 bp, synthetic construct
  source 1..18: mol_type = other DNA
tactgtgtgcaaggtgaa

SEQ ID NO: 33711 - DNA, 18 bp, synthetic construct
  source 1..18: mol_type = other DNA
ttactgtgtgcaaggtga

SEQ ID NO: 33712 - DNA, 18 bp, synthetic construct
  source 1..18: mol_type = other DNA
ttgtgcattgtctgttac

SEQ ID NO: 33713 - DNA, 18 bp, synthetic construct
  source 1..18: mol_type = other DNA
tttgtgcattgtctgtta

SEQ ID NO: 33714 - DNA, 18 bp, synthetic construct
  source 1..18: mol_type = other DNA
atttgtgcattgtctgtt

SEQ ID NO: 33715 - DNA, 18 bp, synthetic construct
  source 1..18: mol_type = other DNA
gatttgtgcattgtctgt

SEQ ID NO: 33716 - DNA, 18 bp, synthetic construct
  source 1..18: mol_type = other DNA
ggatttgtgcattgtctg

SEQ ID NO: 33717 - DNA, 18 bp, synthetic construct
  source 1..18: mol_type = other DNA
tggatttgtgcattgtct

SEQ ID NO: 33718 - DNA, 18 bp, synthetic construct
  source 1..18: mol_type = other DNA
gtggatttgtgcattgtc

SEQ ID NO: 33719 - DNA, 18 bp, synthetic construct
  source 1..18: mol_type = other DNA
agtggatttgtgcattgt

SEQ ID NO: 33720 - DNA, 18 bp, synthetic construct
  source 1..18: mol_type = other DNA
aagtggatttgtgcattg

SEQ ID NO: 33721 - DNA, 18 bp, synthetic construct
  source 1..18: mol_type = other DNA
gaagtggatttgtgcatt

SEQ ID NO: 33722 - DNA, 18 bp, synthetic construct
  source 1..18: mol_type = other DNA
ggaagtggatttgtgcat

SEQ ID NO: 33723 - DNA, 18 bp, synthetic construct
  source 1..18: mol_type = other DNA
aggaagtggatttgtgca

SEQ ID NO: 33724 - DNA, 18 bp, synthetic construct
  source 1..18: mol_type = other DNA
aaggaagtggatttgtgc

SEQ ID NO: 33725 - DNA, 18 bp, synthetic construct
  source 1..18: mol_type = other DNA
tccataaggaagtggatt

SEQ ID NO: 33726 - DNA, 18 bp, synthetic construct
  source 1..18: mol_type = other DNA
gtccataaggaagtggat

SEQ ID NO: 33727 - DNA, 18 bp, synthetic construct
  source 1..18: mol_type = other DNA
cgtccataaggaagtgga

SEQ ID NO: 33728 - DNA, 18 bp, synthetic construct
  source 1..18: mol_type = other DNA
ccgtccataaggaagtgg

SEQ ID NO: 33729 - DNA, 18 bp, synthetic construct
  source 1..18: mol_type = other DNA
tccgtccataaggaagtg

SEQ ID NO: 33730 - DNA, 18 bp, synthetic construct
  source 1..18: mol_type = other DNA
ttccgtccataaggaagt

SEQ ID NO: 33731 - DNA, 18 bp, synthetic construct
  source 1..18: mol_type = other DNA
tttccgtccataaggaag

SEQ ID NO: 33732 - DNA, 18 bp, synthetic construct
  source 1..18: mol_type = other DNA
atttccgtccataaggaa

SEQ ID NO: 33733 - DNA, 18 bp, synthetic construct
  source 1..18: mol_type = other DNA
aatttccgtccataagga

SEQ ID NO: 33734 - DNA, 18 bp, synthetic construct
  source 1..18: mol_type = other DNA
gaatttccgtccataagg

SEQ ID NO: 33735 - DNA, 18 bp, synthetic construct
  source 1..18: mol_type = other DNA
agaatttccgtccataag

SEQ ID NO: 33736 - DNA, 18 bp, synthetic construct
  source 1..18: mol_type = other DNA
cagaatttccgtccataa

SEQ ID NO: 33737 - DNA, 18 bp, synthetic construct
  source 1..18: mol_type = other DNA
tcagaatttccgtccata

SEQ ID NO: 33738 - DNA, 18 bp, synthetic construct
  source 1..18: mol_type = other DNA
ttcagaatttccgtccat

SEQ ID NO: 33739 - DNA, 18 bp, synthetic construct
  source 1..18: mol_type = other DNA
tttcagaatttccgtcca

SEQ ID NO: 33740 - DNA, 18 bp, synthetic construct
  source 1..18: mol_type = other DNA
atttcagaatttccgtcc

SEQ ID NO: 33741 - DNA, 18 bp, synthetic construct
  source 1..18: mol_type = other DNA
gatttcagaatttccgtc

SEQ ID NO: 33742 - DNA, 18 bp, synthetic construct
  source 1..18: mol_type = other DNA
ggatttcagaatttccgt

SEQ ID NO: 33743 - DNA, 18 bp, synthetic construct
  source 1..18: mol_type = other DNA
aggatttcagaatttccg

SEQ ID NO: 33744 - DNA, 18 bp, synthetic construct
  source 1..18: mol_type = other DNA
gccaggcataaaaggatt

SEQ ID NO: 33745 - DNA, 18 bp, synthetic construct
  source 1..18: mol_type = other DNA
ggccaggcataaaaggat

SEQ ID NO: 33746 - DNA, 18 bp, synthetic construct
  source 1..18: mol_type = other DNA
aggccaggcataaaagga

SEQ ID NO: 33747 - DNA, 18 bp, synthetic construct
  source 1..18: mol_type = other DNA
aaggccaggcataaaagg

SEQ ID NO: 33748 - DNA, 18 bp, synthetic construct
  source 1..18: mol_type = other DNA
ggaaaggccaggcataaa

SEQ ID NO: 33749 - DNA, 18 bp, synthetic construct
  source 1..18: mol_type = other DNA
tggaaaggccaggcataa

SEQ ID NO: 33750 - DNA, 18 bp, synthetic construct
  source 1..18: mol_type = other DNA
atggaaaggccaggcata

SEQ ID NO: 33751 - DNA, 18 bp, synthetic construct
  source 1..18: mol_type = other DNA
gatggaaaggccaggcat

SEQ ID NO: 33752 - DNA, 18 bp, synthetic construct
  source 1..18: mol_type = other DNA
ggatggaaaggccaggca

SEQ ID NO: 33753 - DNA, 18 bp, synthetic construct
  source 1..18: mol_type = other DNA
aggatggaaaggccaggc

SEQ ID NO: 33754 - DNA, 18 bp, synthetic construct
  source 1..18: mol_type = other DNA
aaggatggaaaggccagg

SEQ ID NO: 33755 - DNA, 18 bp, synthetic construct
  source 1..18: mol_type = other DNA
gaaggatggaaaggccag

SEQ ID NO: 33756 - DNA, 18 bp, synthetic construct
  source 1..18: mol_type = other DNA
tgaaggatggaaaggcca

SEQ ID NO: 33757 - DNA, 18 bp, synthetic construct
  source 1..18: mol_type = other DNA
ttgaaggatggaaaggcc

SEQ ID NO: 33758 - DNA, 18 bp, synthetic construct
  source 1..18: mol_type = other DNA
gttgaaggatggaaaggc

SEQ ID NO: 33759 - DNA, 18 bp, synthetic construct
  source 1..18: mol_type = other DNA
gggaagttgaaggatgga

SEQ ID NO: 33760 - DNA, 18 bp, synthetic construct
  source 1..18: mol_type = other DNA
ggggaagttgaaggatgg

SEQ ID NO: 33761 - DNA, 18 bp, synthetic construct
  source 1..18: mol_type = other DNA
aggggaagttgaaggatg

SEQ ID NO: 33762 - DNA, 18 bp, synthetic construct
  source 1..18: mol_type = other DNA
gggaaaggggaagttgaa

SEQ ID NO: 33763 - DNA, 18 bp, synthetic construct
  source 1..18: mol_type = other DNA
tgggaaaggggaagttga

SEQ ID NO: 33764 - DNA, 18 bp, synthetic construct
  source 1..18: mol_type = other DNA
atgggaaaggggaagttg

SEQ ID NO: 33765 - DNA, 18 bp, synthetic construct
  source 1..18: mol_type = other DNA
catgggaaaggggaagtt

SEQ ID NO: 33766 - DNA, 18 bp, synthetic construct
  source 1..18: mol_type = other DNA
gcatgggaaaggggaagt

SEQ ID NO: 33767 - DNA, 18 bp, synthetic construct
  source 1..18: mol_type = other DNA
agcatgggaaaggggaag

SEQ ID NO: 33768 - DNA, 18 bp, synthetic construct
  source 1..18: mol_type = other DNA
cagcatgggaaaggggaa

SEQ ID NO: 33769 - DNA, 18 bp, synthetic construct
  source 1..18: mol_type = other DNA
acagcatgggaaagggga

SEQ ID NO: 33770 - DNA, 18 bp, synthetic construct
  source 1..18: mol_type = other DNA
cacagcatgggaaagggg

SEQ ID NO: 33771 - DNA, 18 bp, synthetic construct
  source 1..18: mol_type = other DNA
tcacagcatgggaaaggg

SEQ ID NO: 33772 - DNA, 18 bp, synthetic construct
  source 1..18: mol_type = other DNA
ttcacagcatgggaaagg

SEQ ID NO: 33773 - DNA, 18 bp, synthetic construct
  source 1..18: mol_type = other DNA
attcacagcatgggaaag

SEQ ID NO: 33774 - DNA, 18 bp, synthetic construct
  source 1..18: mol_type = other DNA
cattcacagcatgggaaa

SEQ ID NO: 33775 - DNA, 18 bp, synthetic construct
  source 1..18: mol_type = other DNA
tcattcacagcatgggaa

SEQ ID NO: 33776 - DNA, 18 bp, synthetic construct
  source 1..18: mol_type = other DNA
atcattcacagcatggga

SEQ ID NO: 33777 - DNA, 18 bp, synthetic construct
  source 1..18: mol_type = other DNA
aatcattcacagcatggg

SEQ ID NO: 33778 - DNA, 18 bp, synthetic construct
  source 1..18: mol_type = other DNA
caatcattcacagcatgg

SEQ ID NO: 33779 - DNA, 18 bp, synthetic construct
  source 1..18: mol_type = other DNA
acaatcattcacagcatg

SEQ ID NO: 33780 - DNA, 18 bp, synthetic construct
  source 1..18: mol_type = other DNA
ccctgtcactgagattaa

SEQ ID NO: 33781 - DNA, 18 bp, synthetic construct
  source 1..18: mol_type = other DNA
cccctgtcactgagatta

SEQ ID NO: 33782 - DNA, 18 bp, synthetic construct
  source 1..18: mol_type = other DNA
tcccctgtcactgagatt

SEQ ID NO: 33783 - DNA, 18 bp, synthetic construct
  source 1..18: mol_type = other DNA
ttcccctgtcactgagat

SEQ ID NO: 33784 - DNA, 18 bp, synthetic construct
  source 1..18: mol_type = other DNA
gttcccctgtcactgaga

SEQ ID NO: 33785 - DNA, 18 bp, synthetic construct
  source 1..18: mol_type = other DNA
tgttcccctgtcactgag

SEQ ID NO: 33786 - DNA, 18 bp, synthetic construct
  source 1..18: mol_type = other DNA
tgtgttcccctgtcactg

SEQ ID NO: 33787 - DNA, 18 bp, synthetic construct
  source 1..18: mol_type = other DNA
agagctacctgtgttccc

SEQ ID NO: 33788 - DNA, 18 bp, synthetic construct
  source 1..18: mol_type = other DNA
tagagctacctgtgttcc

SEQ ID NO: 33789 - DNA, 18 bp, synthetic construct
  source 1..18: mol_type = other DNA
ttagagctacctgtgttc

SEQ ID NO: 33790 - DNA, 18 bp, synthetic construct
  source 1..18: mol_type = other DNA
attagagctacctgtgtt

SEQ ID NO: 33791 - DNA, 18 bp, synthetic construct
  source 1..18: mol_type = other DNA
tattagagctacctgtgt

SEQ ID NO: 33792 - DNA, 18 bp, synthetic construct
  source 1..18: mol_type = other DNA
atattagagctacctgtg

SEQ ID NO: 33793 - DNA, 18 bp, synthetic construct
  source 1..18: mol_type = other DNA
tatattagagctacctgt

SEQ ID NO: 33794 - DNA, 18 bp, synthetic construct
  source 1..18: mol_type = other DNA
ctatattagagctacctg

SEQ ID NO: 33795 - DNA, 18 bp, synthetic construct
  source 1..18: mol_type = other DNA
gctatattagagctacct

SEQ ID NO: 33796 - DNA, 18 bp, synthetic construct
  source 1..18: mol_type = other DNA
agctatattagagctacc

SEQ ID NO: 33797 - DNA, 18 bp, synthetic construct
  source 1..18: mol_type = other DNA
cagctatattagagctac

SEQ ID NO: 33798 - DNA, 18 bp, synthetic construct
  source 1..18: mol_type = other DNA
acagctatattagagcta

SEQ ID NO: 33799 - DNA, 18 bp, synthetic construct
  source 1..18: mol_type = other DNA
cacagctatattagagct

SEQ ID NO: 33800 - DNA, 18 bp, synthetic construct
  source 1..18: mol_type = other DNA
tcacagctatattagagc

SEQ ID NO: 33801 - DNA, 18 bp, synthetic construct
  source 1..18: mol_type = other DNA
gtcacagctatattagag

SEQ ID NO: 33802 - DNA, 18 bp, synthetic construct
  source 1..18: mol_type = other DNA
agtcacagctatattaga

SEQ ID NO: 33803 - DNA, 18 bp, synthetic construct
  source 1..18: mol_type = other DNA
cagtcacagctatattag

SEQ ID NO: 33804 - DNA, 18 bp, synthetic construct
  source 1..18: mol_type = other DNA
tcagtcacagctatatta

SEQ ID NO: 33805 - DNA, 18 bp, synthetic construct
  source 1..18: mol_type = other DNA
ctcagtcacagctatatt

SEQ ID NO: 33806 - DNA, 18 bp, synthetic construct
  source 1..18: mol_type = other DNA
tctcagtcacagctatat

SEQ ID NO: 33807 - DNA, 18 bp, synthetic construct
  source 1..18: mol_type = other DNA
atctcagtcacagctata

SEQ ID NO: 33808 - DNA, 18 bp, synthetic construct
  source 1..18: mol_type = other DNA
cctagaatgcagtggaaa

SEQ ID NO: 33809 - DNA, 18 bp, synthetic construct
  source 1..18: mol_type = other DNA
tcctagaatgcagtggaa

SEQ ID NO: 33810 - DNA, 18 bp, synthetic construct
  source 1..18: mol_type = other DNA
ttcctagaatgcagtgga

SEQ ID NO: 33811 - DNA, 18 bp, synthetic construct
  source 1..18: mol_type = other DNA
gttcctagaatgcagtgg

SEQ ID NO: 33812 - DNA, 18 bp, synthetic construct
  source 1..18: mol_type = other DNA
tgttcctagaatgcagtg

SEQ ID NO: 33813 - DNA, 18 bp, synthetic construct
  source 1..18: mol_type = other DNA
ctgttcctagaatgcagt

SEQ ID NO: 33814 - DNA, 18 bp, synthetic construct
  source 1..18: mol_type = other DNA
actgttcctagaatgcag

SEQ ID NO: 33815 - DNA, 18 bp, synthetic construct
  source 1..18: mol_type = other DNA
tactgttcctagaatgca

SEQ ID NO: 33816 - DNA, 18 bp, synthetic construct
  source 1..18: mol_type = other DNA
ttactgttcctagaatgc

SEQ ID NO: 33817 - DNA, 18 bp, synthetic construct
  source 1..18: mol_type = other DNA
cttactgttcctagaatg

SEQ ID NO: 33818 - DNA, 18 bp, synthetic construct
  source 1..18: mol_type = other DNA
tcttactgttcctagaat

SEQ ID NO: 33819 - DNA, 18 bp, synthetic construct
  source 1..18: mol_type = other DNA
ctcttactgttcctagaa

SEQ ID NO: 33820 - DNA, 18 bp, synthetic construct
  source 1..18: mol_type = other DNA
cctcttactgttcctaga

SEQ ID NO: 33821 - DNA, 18 bp, synthetic construct
  source 1..18: mol_type = other DNA
tcctcttactgttcctag

SEQ ID NO: 33822 - DNA, 18 bp, synthetic construct
  source 1..18: mol_type = other DNA
gtcctcttactgttccta

SEQ ID NO: 33823 - DNA, 18 bp, synthetic construct
  source 1..18: mol_type = other DNA
ggtcctcttactgttcct

SEQ ID NO: 33824 - DNA, 18 bp, synthetic construct
  source 1..18: mol_type = other DNA
aggtcctcttactgttcc

SEQ ID NO: 33825 - DNA, 18 bp, synthetic construct
  source 1..18: mol_type = other DNA
aaggtcctcttactgttc

SEQ ID NO: 33826 - DNA, 18 bp, synthetic construct
  source 1..18: mol_type = other DNA
caaggtcctcttactgtt

SEQ ID NO: 33827 - DNA, 18 bp, synthetic construct
  source 1..18: mol_type = other DNA
acaaggtcctcttactgt

SEQ ID NO: 33828 - DNA, 18 bp, synthetic construct
  source 1..18: mol_type = other DNA
cacaaggtcctcttactg

SEQ ID NO: 33829 - DNA, 18 bp, synthetic construct
  source 1..18: mol_type = other DNA
tcacaaggtcctcttact

SEQ ID NO: 33830 - DNA, 18 bp, synthetic construct
  source 1..18: mol_type = other DNA
ctcacaaggtcctcttac

SEQ ID NO: 33831 - DNA, 18 bp, synthetic construct
  source 1..18: mol_type = other DNA
actcacaaggtcctctta

SEQ ID NO: 33832 - DNA, 18 bp, synthetic construct
  source 1..18: mol_type = other DNA
cactcacaaggtcctctt

SEQ ID NO: 33833 - DNA, 18 bp, synthetic construct
  source 1..18: mol_type = other DNA
tcactcacaaggtcctct

SEQ ID NO: 33834 - DNA, 18 bp, synthetic construct
  source 1..18: mol_type = other DNA
ttcactcacaaggtcctc

SEQ ID NO: 33835 - DNA, 18 bp, synthetic construct
  source 1..18: mol_type = other DNA
attcactcacaaggtcct

SEQ ID NO: 33836 - DNA, 18 bp, synthetic construct
  source 1..18: mol_type = other DNA
tattcactcacaaggtcc

SEQ ID NO: 33837 - DNA, 18 bp, synthetic construct
  source 1..18: mol_type = other DNA
ttattcactcacaaggtc

SEQ ID NO: 33838 - DNA, 18 bp, synthetic construct
  source 1..18: mol_type = other DNA
attattcactcacaaggt

SEQ ID NO: 33839 - DNA, 18 bp, synthetic construct
  source 1..18: mol_type = other DNA
ccactctgtaatgtggaa

SEQ ID NO: 33840 - DNA, 18 bp, synthetic construct
  source 1..18: mol_type = other DNA
cccactctgtaatgtgga

SEQ ID NO: 33841 - DNA, 18 bp, synthetic construct
  source 1..18: mol_type = other DNA
acccactctgtaatgtgg

SEQ ID NO: 33842 - DNA, 18 bp, synthetic construct
  source 1..18: mol_type = other DNA
tacccactctgtaatgtg

SEQ ID NO: 33843 - DNA, 18 bp, synthetic construct
  source 1..18: mol_type = other DNA
ttacccactctgtaatgt

SEQ ID NO: 33844 - DNA, 18 bp, synthetic construct
  source 1..18: mol_type = other DNA
attacccactctgtaatg

SEQ ID NO: 33845 - DNA, 18 bp, synthetic construct
  source 1..18: mol_type = other DNA
tattacccactctgtaat

SEQ ID NO: 33846 - DNA, 18 bp, synthetic construct
  source 1..18: mol_type = other DNA
ttattacccactctgtaa

SEQ ID NO: 33847 - DNA, 18 bp, synthetic construct
  source 1..18: mol_type = other DNA
cttattacccactctgta

SEQ ID NO: 33848 - DNA, 18 bp, synthetic construct
  source 1..18: mol_type = other DNA
gcttattacccactctgt

SEQ ID NO: 33849 - DNA, 18 bp, synthetic construct
  source 1..18: mol_type = other DNA
tgcttattacccactctg

SEQ ID NO: 33850 - DNA, 18 bp, synthetic construct
  source 1..18: mol_type = other DNA
ctgcttattacccactct

SEQ ID NO: 33851 - DNA, 18 bp, synthetic construct
  source 1..18: mol_type = other DNA
tctgcttattacccactc

SEQ ID NO: 33852 - DNA, 18 bp, synthetic construct
  source 1..18: mol_type = other DNA
atctgcttattacccact

SEQ ID NO: 33853 - DNA, 18 bp, synthetic construct
  source 1..18: mol_type = other DNA
aatctgcttattacccac

SEQ ID NO: 33854 - DNA, 18 bp, synthetic construct
  source 1..18: mol_type = other DNA
taatctgcttattaccca

SEQ ID NO: 33855 - DNA, 18 bp, synthetic construct
  source 1..18: mol_type = other DNA
ctaatctgcttattaccc

SEQ ID NO: 33856 - DNA, 18 bp, synthetic construct
  source 1..18: mol_type = other DNA
actaatctgcttattacc

SEQ ID NO: 33857 - DNA, 18 bp, synthetic construct
  source 1..18: mol_type = other DNA
gtttttactaatctgctt

SEQ ID NO: 33858 - DNA, 19 bp, synthetic construct
  source 1..19: mol_type = other DNA
ggacgcgggcagagagagg

SEQ ID NO: 33859 - DNA, 19 bp, synthetic construct
  source 1..19: mol_type = other DNA
cggacgcgggcagagagag

SEQ ID NO: 33860 - DNA, 19 bp, synthetic construct
  source 1..19: mol_type = other DNA
acggacgcgggcagagaga

SEQ ID NO: 33861 - DNA, 19 bp, synthetic construct
  source 1..19: mol_type = other DNA
gacggacgcgggcagagag

SEQ ID NO: 33862 - DNA, 19 bp, synthetic construct
  source 1..19: mol_type = other DNA
ggacggacgcgggcagaga

SEQ ID NO: 33863 - DNA, 19 bp, synthetic construct
  source 1..19: mol_type = other DNA
cggacggacgcgggcagag

SEQ ID NO: 33864 - DNA, 19 bp, synthetic construct
  source 1..19: mol_type = other DNA
acggacggacgcgggcaga

SEQ ID NO: 33865 - DNA, 19 bp, synthetic construct
  source 1..19: mol_type = other DNA
cacggacggacgcgggcag

SEQ ID NO: 33866 - DNA, 19 bp, synthetic construct
  source 1..19: mol_type = other DNA
tcacggacggacgcgggca

SEQ ID NO: 33867 - DNA, 19 bp, synthetic construct
  source 1..19: mol_type = other DNA
ttcacggacggacgcgggc

SEQ ID NO: 33868 - DNA, 19 bp, synthetic construct
  source 1..19: mol_type = other DNA
tttcacggacggacgcggg

SEQ ID NO: 33869 - DNA, 19 bp, synthetic construct
  source 1..19: mol_type = other DNA
atttcacggacggacgcgg

SEQ ID NO: 33870 - DNA, 19 bp, synthetic construct
  source 1..19: mol_type = other DNA
aatttcacggacggacgcg

SEQ ID NO: 33871 - DNA, 19 bp, synthetic construct
  source 1..19: mol_type = other DNA
gaatttcacggacggacgc

SEQ ID NO: 33872 - DNA, 19 bp, synthetic construct
  source 1..19: mol_type = other DNA
ggaatttcacggacggacg

SEQ ID NO: 33873 - DNA, 19 bp, synthetic construct
  source 1..19: mol_type = other DNA
cggaatttcacggacggac

SEQ ID NO: 33874 - DNA, 19 bp, synthetic construct
  source 1..19: mol_type = other DNA
ccggaatttcacggacgga

SEQ ID NO: 33875 - DNA, 19 bp, synthetic construct
  source 1..19: mol_type = other DNA
gccggaatttcacggacgg

SEQ ID NO: 33876 - DNA, 19 bp, synthetic construct
  source 1..19: mol_type = other DNA
ggccggaatttcacggacg

SEQ ID NO: 33877 - DNA, 19 bp, synthetic construct
  source 1..19: mol_type = other DNA
cggccggaatttcacggac

SEQ ID NO: 33878 - DNA, 19 bp, synthetic construct
  source 1..19: mol_type = other DNA
ccggccggaatttcacgga

SEQ ID NO: 33879 - DNA, 19 bp, synthetic construct
  source 1..19: mol_type = other DNA
cccggccggaatttcacgg

SEQ ID NO: 33880 - DNA, 19 bp, synthetic construct
  source 1..19: mol_type = other DNA
ccccggccggaatttcacg

SEQ ID NO: 33881 - DNA, 19 bp, synthetic construct
  source 1..19: mol_type = other DNA
tgagccccggccggaattt

SEQ ID NO: 33882 - DNA, 19 bp, synthetic construct
  source 1..19: mol_type = other DNA
tgtccgagggtgtcgggag

SEQ ID NO: 33883 - DNA, 19 bp, synthetic construct
  source 1..19: mol_type = other DNA
aacgagtctccgtcgccgt

SEQ ID NO: 33884 - DNA, 19 bp, synthetic construct
  source 1..19: mol_type = other DNA
aaacgagtctccgtcgccg

SEQ ID NO: 33885 - DNA, 19 bp, synthetic construct
  source 1..19: mol_type = other DNA
caaacgagtctccgtcgcc

SEQ ID NO: 33886 - DNA, 19 bp, synthetic construct
  source 1..19: mol_type = other DNA
ccaaacgagtctccgtcgc

SEQ ID NO: 33887 - DNA, 19 bp, synthetic construct
  source 1..19: mol_type = other DNA
tccaaacgagtctccgtcg

SEQ ID NO: 33888 - DNA, 19 bp, synthetic construct
  source 1..19: mol_type = other DNA
gtccaaacgagtctccgtc

SEQ ID NO: 33889 - DNA, 19 bp, synthetic construct
  source 1..19: mol_type = other DNA
aaagcaggctcgcagggcc

SEQ ID NO: 33890 - DNA, 19 bp, synthetic construct
  source 1..19: mol_type = other DNA
caaagcaggctcgcagggc

SEQ ID NO: 33891 - DNA, 19 bp, synthetic construct
  source 1..19: mol_type = other DNA
tcaaagcaggctcgcaggg

SEQ ID NO: 33892 - DNA, 19 bp, synthetic construct
  source 1..19: mol_type = other DNA
ctcaaagcaggctcgcagg

SEQ ID NO: 33893 - DNA, 19 bp, synthetic construct
  source 1..19: mol_type = other DNA
gctcaaagcaggctcgcag

SEQ ID NO: 33894 - DNA, 19 bp, synthetic construct
  source 1..19: mol_type = other DNA
cgctcaaagcaggctcgca

SEQ ID NO: 33895 - DNA, 19 bp, synthetic construct
  source 1..19: mol_type = other DNA
ccgctcaaagcaggctcgc

SEQ ID NO: 33896 - DNA, 19 bp, synthetic construct
  source 1..19: mol_type = other DNA
tccgctcaaagcaggctcg

SEQ ID NO: 33897 - DNA, 19 bp, synthetic construct
  source 1..19: mol_type = other DNA
ttccgctcaaagcaggctc

SEQ ID NO: 33898 - DNA, 19 bp, synthetic construct
  source 1..19: mol_type = other DNA
gttccgctcaaagcaggct

SEQ ID NO: 33899 - DNA, 19 bp, synthetic construct
  source 1..19: mol_type = other DNA
ggttccgctcaaagcaggc

SEQ ID NO: 33900 - DNA, 19 bp, synthetic construct
  source 1..19: mol_type = other DNA
gggttccgctcaaagcagg

SEQ ID NO: 33901 - DNA, 19 bp, synthetic construct
  source 1..19: mol_type = other DNA
cgggttccgctcaaagcag

SEQ ID NO: 33902 - DNA, 19 bp, synthetic construct
  source 1..19: mol_type = other DNA
acgggttccgctcaaagca

SEQ ID NO: 33903 - DNA, 19 bp, synthetic construct
  source 1..19: mol_type = other DNA
tacgggttccgctcaaagc

SEQ ID NO: 33904 - DNA, 19 bp, synthetic construct
  source 1..19: mol_type = other DNA
gtacgggttccgctcaaag

SEQ ID NO: 33905 - DNA, 19 bp, synthetic construct
  source 1..19: mol_type = other DNA
ggtacgggttccgctcaaa

SEQ ID NO: 33906 - DNA, 19 bp, synthetic construct
  source 1..19: mol_type = other DNA
gggtacgggttccgctcaa

SEQ ID NO: 33907 - DNA, 19 bp, synthetic construct
  source 1..19: mol_type = other DNA
cgatgcccgggtacgggtt

SEQ ID NO: 33908 - DNA, 19 bp, synthetic construct
  source 1..19: mol_type = other DNA
gaatgccgatggcctgggc

SEQ ID NO: 33909 - DNA, 19 bp, synthetic construct
  source 1..19: mol_type = other DNA
ggaatgccgatggcctggg

SEQ ID NO: 33910 - DNA, 19 bp, synthetic construct
  source 1..19: mol_type = other DNA
aaatctggaccctgggctc

SEQ ID NO: 33911 - DNA, 19 bp, synthetic construct
  source 1..19: mol_type = other DNA
caaatctggaccctgggct

SEQ ID NO: 33912 - DNA, 19 bp, synthetic construct
  source 1..19: mol_type = other DNA
ccaaatctggaccctgggc

SEQ ID NO: 33913 - DNA, 19 bp, synthetic construct
  source 1..19: mol_type = other DNA
accaaatctggaccctggg

SEQ ID NO: 33914 - DNA, 19 bp, synthetic construct
  source 1..19: mol_type = other DNA
aaccaaatctggaccctgg

SEQ ID NO: 33915 - DNA, 19 bp, synthetic construct
  source 1..19: mol_type = other DNA
aaaccaaatctggaccctg

SEQ ID NO: 33916 - DNA, 19 bp, synthetic construct
  source 1..19: mol_type = other DNA
gaaaccaaatctggaccct

SEQ ID NO: 33917 - DNA, 19 bp, synthetic construct
  source 1..19: mol_type = other DNA
tgaaaccaaatctggaccc

SEQ ID NO: 33918 - DNA, 19 bp, synthetic construct
  source 1..19: mol_type = other DNA
ctgaaaccaaatctggacc

SEQ ID NO: 33919 - DNA, 19 bp, synthetic construct
  source 1..19: mol_type = other DNA
cctctcattctgaaaccaa

SEQ ID NO: 33920 - DNA, 19 bp, synthetic construct
  source 1..19: mol_type = other DNA
acctctcattctgaaacca

SEQ ID NO: 33921 - DNA, 19 bp, synthetic construct
  source 1..19: mol_type = other DNA
gacctctcattctgaaacc

SEQ ID NO: 33922 - DNA, 19 bp, synthetic construct
  source 1..19: mol_type = other DNA
tgacctctcattctgaaac

SEQ ID NO: 33923 - DNA, 19 bp, synthetic construct
  source 1..19: mol_type = other DNA
gtgacctctcattctgaaa

SEQ ID NO: 33924 - DNA, 19 bp, synthetic construct
  source 1..19: mol_type = other DNA
cgtgacctctcattctgaa

SEQ ID NO: 33925 - DNA, 19 bp, synthetic construct
  source 1..19: mol_type = other DNA
gcgtgacctctcattctga

SEQ ID NO: 33926 - DNA, 19 bp, synthetic construct
  source 1..19: mol_type = other DNA
ggcgtgacctctcattctg

SEQ ID NO: 33927 - DNA, 19 bp, synthetic construct
  source 1..19: mol_type = other DNA
tggcgtgacctctcattct

SEQ ID NO: 33928 - DNA, 19 bp, synthetic construct
  source 1..19: mol_type = other DNA
ctggcgtgacctctcattc

SEQ ID NO: 33929 - DNA, 19 bp, synthetic construct
  source 1..19: mol_type = other DNA
gctggcgtgacctctcatt

SEQ ID NO: 33930 - DNA, 19 bp, synthetic construct
  source 1..19: mol_type = other DNA
agctggcgtgacctctcat

SEQ ID NO: 33931 - DNA, 19 bp, synthetic construct
  source 1..19: mol_type = other DNA
aatcctggactccgggagg

SEQ ID NO: 33932 - DNA, 19 bp, synthetic construct
  source 1..19: mol_type = other DNA
gaatcctggactccgggag

SEQ ID NO: 33933 - DNA, 19 bp, synthetic construct
  source 1..19: mol_type = other DNA
tgaatcctggactccggga

SEQ ID NO: 33934 - DNA, 19 bp, synthetic construct
  source 1..19: mol_type = other DNA
ctgaatcctggactccggg

SEQ ID NO: 33935 - DNA, 19 bp, synthetic construct
  source 1..19: mol_type = other DNA
tctgaatcctggactccgg

SEQ ID NO: 33936 - DNA, 19 bp, synthetic construct
  source 1..19: mol_type = other DNA
atctgaatcctggactccg

SEQ ID NO: 33937 - DNA, 19 bp, synthetic construct
  source 1..19: mol_type = other DNA
gatctgaatcctggactcc

SEQ ID NO: 33938 - DNA, 19 bp, synthetic construct
  source 1..19: mol_type = other DNA
agatctgaatcctggactc

SEQ ID NO: 33939 - DNA, 19 bp, synthetic construct
  source 1..19: mol_type = other DNA
cagatctgaatcctggact

SEQ ID NO: 33940 - DNA, 19 bp, synthetic construct
  source 1..19: mol_type = other DNA
ccagatctgaatcctggac

SEQ ID NO: 33941 - DNA, 19 bp, synthetic construct
  source 1..19: mol_type = other DNA
accagatctgaatcctgga

SEQ ID NO: 33942 - DNA, 19 bp, synthetic construct
  source 1..19: mol_type = other DNA
aaccagatctgaatcctgg

SEQ ID NO: 33943 - DNA, 19 bp, synthetic construct
  source 1..19: mol_type = other DNA
aaaccagatctgaatcctg

SEQ ID NO: 33944 - DNA, 19 bp, synthetic construct
  source 1..19: mol_type = other DNA
gaaaccagatctgaatcct

SEQ ID NO: 33945 - DNA, 19 bp, synthetic construct
  source 1..19: mol_type = other DNA
tgaaaccagatctgaatcc

SEQ ID NO: 33946 - DNA, 19 bp, synthetic construct
  source 1..19: mol_type = other DNA
attctgaaaccagatctga

SEQ ID NO: 33947 - DNA, 19 bp, synthetic construct
  source 1..19: mol_type = other DNA
gattctgaaaccagatctg

SEQ ID NO: 33948 - DNA, 19 bp, synthetic construct
  source 1..19: mol_type = other DNA
cgattctgaaaccagatct

SEQ ID NO: 33949 - DNA, 19 bp, synthetic construct
  source 1..19: mol_type = other DNA
tcgattctgaaaccagatc

SEQ ID NO: 33950 - DNA, 19 bp, synthetic construct
  source 1..19: mol_type = other DNA
ttcgattctgaaaccagat

SEQ ID NO: 33951 - DNA, 19 bp, synthetic construct
  source 1..19: mol_type = other DNA
cttcgattctgaaaccaga

SEQ ID NO: 33952 - DNA, 19 bp, synthetic construct
  source 1..19: mol_type = other DNA
ccttcgattctgaaaccag

SEQ ID NO: 33953 - DNA, 19 bp, synthetic construct
  source 1..19: mol_type = other DNA
cccttcgattctgaaacca

SEQ ID NO: 33954 - DNA, 19 bp, synthetic construct
  source 1..19: mol_type = other DNA
gcccttcgattctgaaacc

SEQ ID NO: 33955 - DNA, 19 bp, synthetic construct
  source 1..19: mol_type = other DNA
ggcccttcgattctgaaac

SEQ ID NO: 33956 - DNA, 19 bp, synthetic construct
  source 1..19: mol_type = other DNA
tggcccttcgattctgaaa

SEQ ID NO: 33957 - DNA, 19 bp, synthetic construct
  source 1..19: mol_type = other DNA
ctggcccttcgattctgaa

SEQ ID NO: 33958 - DNA, 19 bp, synthetic construct
  source 1..19: mol_type = other DNA
cctggcccttcgattctga

SEQ ID NO: 33959 - DNA, 19 bp, synthetic construct
  source 1..19: mol_type = other DNA
cgggatgccttgcatctgc

SEQ ID NO: 33960 - DNA, 19 bp, synthetic construct
  source 1..19: mol_type = other DNA
ccgggatgccttgcatctg

SEQ ID NO: 33961 - DNA, 19 bp, synthetic construct
  source 1..19: mol_type = other DNA
attcttcctcgctgagggg

SEQ ID NO: 33962 - DNA, 19 bp, synthetic construct
  source 1..19: mol_type = other DNA
tattcttcctcgctgaggg

SEQ ID NO: 33963 - DNA, 19 bp, synthetic construct
  source 1..19: mol_type = other DNA
gtattcttcctcgctgagg

SEQ ID NO: 33964 - DNA, 19 bp, synthetic construct
  source 1..19: mol_type = other DNA
ggtattcttcctcgctgag

SEQ ID NO: 33965 - DNA, 19 bp, synthetic construct
  source 1..19: mol_type = other DNA
cggtattcttcctcgctga

SEQ ID NO: 33966 - DNA, 19 bp, synthetic construct
  source 1..19: mol_type = other DNA
ccggtattcttcctcgctg

SEQ ID NO: 33967 - DNA, 19 bp, synthetic construct
  source 1..19: mol_type = other DNA
agcccggtattcttcctcg

SEQ ID NO: 33968 - DNA, 19 bp, synthetic construct
  source 1..19: mol_type = other DNA
agagcccggtattcttcct

SEQ ID NO: 33969 - DNA, 19 bp, synthetic construct
  source 1..19: mol_type = other DNA
cagagcccggtattcttcc

SEQ ID NO: 33970 - DNA, 19 bp, synthetic construct
  source 1..19: mol_type = other DNA
gcagagcccggtattcttc

SEQ ID NO: 33971 - DNA, 19 bp, synthetic construct
  source 1..19: mol_type = other DNA
agcagagcccggtattctt

SEQ ID NO: 33972 - DNA, 19 bp, synthetic construct
  source 1..19: mol_type = other DNA
cagcagagcccggtattct

SEQ ID NO: 33973 - DNA, 19 bp, synthetic construct
  source 1..19: mol_type = other DNA
aaagctcctccagcagagc

SEQ ID NO: 33974 - DNA, 19 bp, synthetic construct
  source 1..19: mol_type = other DNA
taaagctcctccagcagag

SEQ ID NO: 33975 - DNA, 19 bp, synthetic construct
  source 1..19: mol_type = other DNA
ctaaagctcctccagcaga

SEQ ID NO: 33976 - DNA, 19 bp, synthetic construct
  source 1..19: mol_type = other DNA
cctaaagctcctccagcag

SEQ ID NO: 33977 - DNA, 19 bp, synthetic construct
  source 1..19: mol_type = other DNA
tcctaaagctcctccagca

SEQ ID NO: 33978 - DNA, 19 bp, synthetic construct
  source 1..19: mol_type = other DNA
gtcctaaagctcctccagc

SEQ ID NO: 33979 - DNA, 19 bp, synthetic construct
  source 1..19: mol_type = other DNA
cgtcctaaagctcctccag

SEQ ID NO: 33980 - DNA, 19 bp, synthetic construct
  source 1..19: mol_type = other DNA
gcgtcctaaagctcctcca

SEQ ID NO: 33981 - DNA, 19 bp, synthetic construct
  source 1..19: mol_type = other DNA
cgcgtcctaaagctcctcc

SEQ ID NO: 33982 - DNA, 19 bp, synthetic construct
  source 1..19: mol_type = other DNA
ccgcgtcctaaagctcctc

SEQ ID NO: 33983 - DNA, 19 bp, synthetic construct
  source 1..19: mol_type = other DNA
cccgcgtcctaaagctcct

SEQ ID NO: 33984 - DNA, 19 bp, synthetic construct
  source 1..19: mol_type = other DNA
accccgcgtcctaaagctc

SEQ ID NO: 33985 - DNA, 19 bp, synthetic construct
  source 1..19: mol_type = other DNA
aaccccgcgtcctaaagct

SEQ ID NO: 33986 - DNA, 19 bp, synthetic construct
  source 1..19: mol_type = other DNA
caaccccgcgtcctaaagc

SEQ ID NO: 33987 - DNA, 19 bp, synthetic construct
  source 1..19: mol_type = other DNA
ccaaccccgcgtcctaaag

SEQ ID NO: 33988 - DNA, 19 bp, synthetic construct
  source 1..19: mol_type = other DNA
cccaaccccgcgtcctaaa

SEQ ID NO: 33989 - DNA, 19 bp, synthetic construct
  source 1..19: mol_type = other DNA
aagagaggccaccgccctg

SEQ ID NO: 33990 - DNA, 19 bp, synthetic construct
  source 1..19: mol_type = other DNA
aaagagaggccaccgccct

SEQ ID NO: 33991 - DNA, 19 bp, synthetic construct
  source 1..19: mol_type = other DNA
gaaagagaggccaccgccc

SEQ ID NO: 33992 - DNA, 19 bp, synthetic construct
  source 1..19: mol_type = other DNA
cgaaagagaggccaccgcc

SEQ ID NO: 33993 - DNA, 19 bp, synthetic construct
  source 1..19: mol_type = other DNA
gcgaaagagaggccaccgc

SEQ ID NO: 33994 - DNA, 19 bp, synthetic construct
  source 1..19: mol_type = other DNA
cgcgaaagagaggccaccg

SEQ ID NO: 33995 - DNA, 19 bp, synthetic construct
  source 1..19: mol_type = other DNA
ccgcgaaagagaggccacc

SEQ ID NO: 33996 - DNA, 19 bp, synthetic construct
  source 1..19: mol_type = other DNA
cccgcgaaagagaggccac

SEQ ID NO: 33997 - DNA, 19 bp, synthetic construct
  source 1..19: mol_type = other DNA
ccccgcgaaagagaggcca

SEQ ID NO: 33998 - DNA, 19 bp, synthetic construct
  source 1..19: mol_type = other DNA
tccccgcgaaagagaggcc

SEQ ID NO: 33999 - DNA, 19 bp, synthetic construct
  source 1..19: mol_type = other DNA
ttccccgcgaaagagaggc

SEQ ID NO: 34000 - DNA, 19 bp, synthetic construct
  source 1..19: mol_type = other DNA
gttccccgcgaaagagagg

SEQ ID NO: 34001 - DNA, 19 bp, synthetic construct
  source 1..19: mol_type = other DNA
tgttccccgcgaaagagag

SEQ ID NO: 34002 - DNA, 19 bp, synthetic construct
  source 1..19: mol_type = other DNA
gtgttccccgcgaaagaga

SEQ ID NO: 34003 - DNA, 19 bp, synthetic construct
  source 1..19: mol_type = other DNA
ggtgttccccgcgaaagag

SEQ ID NO: 34004 - DNA, 19 bp, synthetic construct
  source 1..19: mol_type = other DNA
aggtgttccccgcgaaaga

SEQ ID NO: 34005 - DNA, 19 bp, synthetic construct
  source 1..19: mol_type = other DNA
caggtgttccccgcgaaag

SEQ ID NO: 34006 - DNA, 19 bp, synthetic construct
  source 1..19: mol_type = other DNA
ccaggtgttccccgcgaaa

SEQ ID NO: 34007 - DNA, 19 bp, synthetic construct
  source 1..19: mol_type = other DNA
aaggcaggaatcccaggcc

SEQ ID NO: 34008 - DNA, 19 bp, synthetic construct
  source 1..19: mol_type = other DNA
gaaggcaggaatcccaggc

SEQ ID NO: 34009 - DNA, 19 bp, synthetic construct
  source 1..19: mol_type = other DNA
agaaggcaggaatcccagg

SEQ ID NO: 34010 - DNA, 19 bp, synthetic construct
  source 1..19: mol_type = other DNA
tagaaggcaggaatcccag

SEQ ID NO: 34011 - DNA, 19 bp, synthetic construct
  source 1..19: mol_type = other DNA
ctagaaggcaggaatccca

SEQ ID NO: 34012 - DNA, 19 bp, synthetic construct
  source 1..19: mol_type = other DNA
cctagaaggcaggaatccc

SEQ ID NO: 34013 - DNA, 19 bp, synthetic construct
  source 1..19: mol_type = other DNA
acctagaaggcaggaatcc

SEQ ID NO: 34014 - DNA, 19 bp, synthetic construct
  source 1..19: mol_type = other DNA
gacctagaaggcaggaatc

SEQ ID NO: 34015 - DNA, 19 bp, synthetic construct
  source 1..19: mol_type = other DNA
agacctagaaggcaggaat

SEQ ID NO: 34016 - DNA, 19 bp, synthetic construct
  source 1..19: mol_type = other DNA
cgggatgcccaggaaagaa

SEQ ID NO: 34017 - DNA, 19 bp, synthetic construct
  source 1..19: mol_type = other DNA
ccgggatgcccaggaaaga

SEQ ID NO: 34018 - DNA, 19 bp, synthetic construct
  source 1..19: mol_type = other DNA
cccgggatgcccaggaaag

SEQ ID NO: 34019 - DNA, 19 bp, synthetic construct
  source 1..19: mol_type = other DNA
ccccgggatgcccaggaaa

SEQ ID NO: 34020 - DNA, 19 bp, synthetic construct
  source 1..19: mol_type = other DNA
tatgcttttgaccgccagg

SEQ ID NO: 34021 - DNA, 19 bp, synthetic construct
  source 1..19: mol_type = other DNA
gtatgcttttgaccgccag

SEQ ID NO: 34022 - DNA, 19 bp, synthetic construct
  source 1..19: mol_type = other DNA
ggtatgcttttgaccgcca

SEQ ID NO: 34023 - DNA, 19 bp, synthetic construct
  source 1..19: mol_type = other DNA
aggtatgcttttgaccgcc

SEQ ID NO: 34024 - DNA, 19 bp, synthetic construct
  source 1..19: mol_type = other DNA
gaggtatgcttttgaccgc

SEQ ID NO: 34025 - DNA, 19 bp, synthetic construct
  source 1..19: mol_type = other DNA
agaggtatgcttttgaccg

SEQ ID NO: 34026 - DNA, 19 bp, synthetic construct
  source 1..19: mol_type = other DNA
cagaggtatgcttttgacc

SEQ ID NO: 34027 - DNA, 19 bp, synthetic construct
  source 1..19: mol_type = other DNA
acagaggtatgcttttgac

SEQ ID NO: 34028 - DNA, 19 bp, synthetic construct
  source 1..19: mol_type = other DNA
gacagaggtatgcttttga

SEQ ID NO: 34029 - DNA, 19 bp, synthetic construct
  source 1..19: mol_type = other DNA
agacagaggtatgcttttg

SEQ ID NO: 34030 - DNA, 19 bp, synthetic construct
  source 1..19: mol_type = other DNA
cagacagaggtatgctttt

SEQ ID NO: 34031 - DNA, 19 bp, synthetic construct
  source 1..19: mol_type = other DNA
acagacagaggtatgcttt

SEQ ID NO: 34032 - DNA, 19 bp, synthetic construct
  source 1..19: mol_type = other DNA
gacagacagaggtatgctt

SEQ ID NO: 34033 - DNA, 19 bp, synthetic construct
  source 1..19: mol_type = other DNA
agacagacagaggtatgct

SEQ ID NO: 34034 - DNA, 19 bp, synthetic construct
  source 1..19: mol_type = other DNA
aagacagacagaggtatgc

SEQ ID NO: 34035 - DNA, 19 bp, synthetic construct
  source 1..19: mol_type = other DNA
gcaaagacagacagaggta

SEQ ID NO: 34036 - DNA, 19 bp, synthetic construct
  source 1..19: mol_type = other DNA
ggcaaagacagacagaggt

SEQ ID NO: 34037 - DNA, 19 bp, synthetic construct
  source 1..19: mol_type = other DNA
gggcaaagacagacagagg

SEQ ID NO: 34038 - DNA, 19 bp, synthetic construct
  source 1..19: mol_type = other DNA
cgggcaaagacagacagag

SEQ ID NO: 34039 - DNA, 19 bp, synthetic construct
  source 1..19: mol_type = other DNA
gcgggcaaagacagacaga

SEQ ID NO: 34040 - DNA, 19 bp, synthetic construct
  source 1..19: mol_type = other DNA
agcgggcaaagacagacag

SEQ ID NO: 34041 - DNA, 19 bp, synthetic construct
  source 1..19: mol_type = other DNA
aagcgggcaaagacagaca

SEQ ID NO: 34042 - DNA, 19 bp, synthetic construct
  source 1..19: mol_type = other DNA
gaagcgggcaaagacagac

SEQ ID NO: 34043 - DNA, 19 bp, synthetic construct
  source 1..19: mol_type = other DNA
ggaagcgggcaaagacaga

SEQ ID NO: 34044 - DNA, 19 bp, synthetic construct
  source 1..19: mol_type = other DNA
aggaagcgggcaaagacag

SEQ ID NO: 34045 - DNA, 19 bp, synthetic construct
  source 1..19: mol_type = other DNA
caggaagcgggcaaagaca

SEQ ID NO: 34046 - DNA, 19 bp, synthetic construct
  source 1..19: mol_type = other DNA
ccaggaagcgggcaaagac

SEQ ID NO: 34047 - DNA, 19 bp, synthetic construct
  source 1..19: mol_type = other DNA
gccaggaagcgggcaaaga

SEQ ID NO: 34048 - DNA, 19 bp, synthetic construct
  source 1..19: mol_type = other DNA
agccaggaagcgggcaaag

SEQ ID NO: 34049 - DNA, 19 bp, synthetic construct
  source 1..19: mol_type = other DNA
tagccaggaagcgggcaaa

SEQ ID NO: 34050 - DNA, 19 bp, synthetic construct
  source 1..19: mol_type = other DNA
ctagccaggaagcgggcaa

SEQ ID NO: 34051 - DNA, 19 bp, synthetic construct
  source 1..19: mol_type = other DNA
tctagccaggaagcgggca

SEQ ID NO: 34052 - DNA, 19 bp, synthetic construct
  source 1..19: mol_type = other DNA
ggtctagccaggaagcggg

SEQ ID NO: 34053 - DNA, 19 bp, synthetic construct
  source 1..19: mol_type = other DNA
aggtctagccaggaagcgg

SEQ ID NO: 34054 - DNA, 19 bp, synthetic construct
  source 1..19: mol_type = other DNA
caggtctagccaggaagcg

SEQ ID NO: 34055 - DNA, 19 bp, synthetic construct
  source 1..19: mol_type = other DNA
gcaggtctagccaggaagc

SEQ ID NO: 34056 - DNA, 19 bp, synthetic construct
  source 1..19: mol_type = other DNA
cgcaggtctagccaggaag

SEQ ID NO: 34057 - DNA, 19 bp, synthetic construct
  source 1..19: mol_type = other DNA
cagcgagctcccttgcacg

SEQ ID NO: 34058 - DNA, 19 bp, synthetic construct
  source 1..19: mol_type = other DNA
cagagaggccagcgagctc

SEQ ID NO: 34059 - DNA, 19 bp, synthetic construct
  source 1..19: mol_type = other DNA
acagagaggccagcgagct

SEQ ID NO: 34060 - DNA, 19 bp, synthetic construct
  source 1..19: mol_type = other DNA
cacagagaggccagcgagc

SEQ ID NO: 34061 - DNA, 19 bp, synthetic construct
  source 1..19: mol_type = other DNA
gcacagagaggccagcgag

SEQ ID NO: 34062 - DNA, 19 bp, synthetic construct
  source 1..19: mol_type = other DNA
aagggcacagagaggccag

SEQ ID NO: 34063 - DNA, 19 bp, synthetic construct
  source 1..19: mol_type = other DNA
caagggcacagagaggcca

SEQ ID NO: 34064 - DNA, 19 bp, synthetic construct
  source 1..19: mol_type = other DNA
acaagggcacagagaggcc

SEQ ID NO: 34065 - DNA, 19 bp, synthetic construct
  source 1..19: mol_type = other DNA
aacaagggcacagagaggc

SEQ ID NO: 34066 - DNA, 19 bp, synthetic construct
  source 1..19: mol_type = other DNA
tcagccagaatttcacgga

SEQ ID NO: 34067 - DNA, 19 bp, synthetic construct
  source 1..19: mol_type = other DNA
ttcagccagaatttcacgg

SEQ ID NO: 34068 - DNA, 19 bp, synthetic construct
  source 1..19: mol_type = other DNA
attcagccagaatttcacg

SEQ ID NO: 34069 - DNA, 19 bp, synthetic construct
  source 1..19: mol_type = other DNA
cattcagccagaatttcac

SEQ ID NO: 34070 - DNA, 19 bp, synthetic construct
  source 1..19: mol_type = other DNA
acattcagccagaatttca

SEQ ID NO: 34071 - DNA, 19 bp, synthetic construct
  source 1..19: mol_type = other DNA
gacattcagccagaatttc

SEQ ID NO: 34072 - DNA, 19 bp, synthetic construct
  source 1..19: mol_type = other DNA
agacattcagccagaattt

SEQ ID NO: 34073 - DNA, 19 bp, synthetic construct
  source 1..19: mol_type = other DNA
gagacattcagccagaatt

SEQ ID NO: 34074 - DNA, 19 bp, synthetic construct
  source 1..19: mol_type = other DNA
ggagacattcagccagaat

SEQ ID NO: 34075 - DNA, 19 bp, synthetic construct
  source 1..19: mol_type = other DNA
gggagacattcagccagaa

SEQ ID NO: 34076 - DNA, 19 bp, synthetic construct
  source 1..19: mol_type = other DNA
ggggagacattcagccaga

SEQ ID NO: 34077 - DNA, 19 bp, synthetic construct
  source 1..19: mol_type = other DNA
gggggagacattcagccag

SEQ ID NO: 34078 - DNA, 19 bp, synthetic construct
  source 1..19: mol_type = other DNA
ggggggagacattcagcca

SEQ ID NO: 34079 - DNA, 19 bp, synthetic construct
  source 1..19: mol_type = other DNA
tggggggagacattcagcc

SEQ ID NO: 34080 - DNA, 19 bp, synthetic construct
  source 1..19: mol_type = other DNA
gtggggggagacattcagc

SEQ ID NO: 34081 - DNA, 19 bp, synthetic construct
  source 1..19: mol_type = other DNA
ggtggggggagacattcag

SEQ ID NO: 34082 - DNA, 19 bp, synthetic construct
  source 1..19: mol_type = other DNA
aggtggggggagacattca

SEQ ID NO: 34083 - DNA, 19 bp, synthetic construct
  source 1..19: mol_type = other DNA
aaggtggggggagacattc

SEQ ID NO: 34084 - DNA, 19 bp, synthetic construct
  source 1..19: mol_type = other DNA
gaaggtggggggagacatt

SEQ ID NO: 34085 - DNA, 19 bp, synthetic construct
  source 1..19: mol_type = other DNA
ggaaggtggggggagacat

SEQ ID NO: 34086 - DNA, 19 bp, synthetic construct
  source 1..19: mol_type = other DNA
cggaaggtggggggagaca

SEQ ID NO: 34087 - DNA, 19 bp, synthetic construct
  source 1..19: mol_type = other DNA
tcggaaggtggggggagac

SEQ ID NO: 34088 - DNA, 19 bp, synthetic construct
  source 1..19: mol_type = other DNA
gtcggaaggtggggggaga

SEQ ID NO: 34089 - DNA, 19 bp, synthetic construct
  source 1..19: mol_type = other DNA
cgtcggaaggtggggggag

SEQ ID NO: 34090 - DNA, 19 bp, synthetic construct
  source 1..19: mol_type = other DNA
agcgtcggaaggtgggggg

SEQ ID NO: 34091 - DNA, 19 bp, synthetic construct
  source 1..19: mol_type = other DNA
cagcgtcggaaggtggggg

SEQ ID NO: 34092 - DNA, 19 bp, synthetic construct
  source 1..19: mol_type = other DNA
acagcgtcggaaggtgggg

SEQ ID NO: 34093 - DNA, 19 bp, synthetic construct
  source 1..19: mol_type = other DNA
gacagcgtcggaaggtggg

SEQ ID NO: 34094 - DNA, 19 bp, synthetic construct
  source 1..19: mol_type = other DNA
agacagcgtcggaaggtgg

SEQ ID NO: 34095 - DNA, 19 bp, synthetic construct
  source 1..19: mol_type = other DNA
tagacagcgtcggaaggtg

SEQ ID NO: 34096 - DNA, 19 bp, synthetic construct
  source 1..19: mol_type = other DNA
ctagacagcgtcggaaggt

SEQ ID NO: 34097 - DNA, 19 bp, synthetic construct
  source 1..19: mol_type = other DNA
cctagacagcgtcggaagg

SEQ ID NO: 34098 - DNA, 19 bp, synthetic construct
  source 1..19: mol_type = other DNA
gcctagacagcgtcggaag

SEQ ID NO: 34099 - DNA, 19 bp, synthetic construct
  source 1..19: mol_type = other DNA
tgcctagacagcgtcggaa

SEQ ID NO: 34100 - DNA, 19 bp, synthetic construct
  source 1..19: mol_type = other DNA
ttgcctagacagcgtcgga

SEQ ID NO: 34101 - DNA, 19 bp, synthetic construct
  source 1..19: mol_type = other DNA
tttgcctagacagcgtcgg

SEQ ID NO: 34102 - DNA, 19 bp, synthetic construct
  source 1..19: mol_type = other DNA
gtttgcctagacagcgtcg

SEQ ID NO: 34103 - DNA, 19 bp, synthetic construct
  source 1..19: mol_type = other DNA
ggtttgcctagacagcgtc

SEQ ID NO: 34104 - DNA, 19 bp, synthetic construct
  source 1..19: mol_type = other DNA
aggtttgcctagacagcgt

SEQ ID NO: 34105 - DNA, 19 bp, synthetic construct
  source 1..19: mol_type = other DNA
caggtttgcctagacagcg

SEQ ID NO: 34106 - DNA, 19 bp, synthetic construct
  source 1..19: mol_type = other DNA
ccaggtttgcctagacagc

SEQ ID NO: 34107 - DNA, 19 bp, synthetic construct
  source 1..19: mol_type = other DNA
tccaggtttgcctagacag

SEQ ID NO: 34108 - DNA, 19 bp, synthetic construct
  source 1..19: mol_type = other DNA
atccaggtttgcctagaca

SEQ ID NO: 34109 - DNA, 19 bp, synthetic construct
  source 1..19: mol_type = other DNA
aatccaggtttgcctagac

SEQ ID NO: 34110 - DNA, 19 bp, synthetic construct
  source 1..19: mol_type = other DNA
taatccaggtttgcctaga

SEQ ID NO: 34111 - DNA, 19 bp, synthetic construct
  source 1..19: mol_type = other DNA
ctaatccaggtttgcctag

SEQ ID NO: 34112 - DNA, 19 bp, synthetic construct
  source 1..19: mol_type = other DNA
tctaatccaggtttgccta

SEQ ID NO: 34113 - DNA, 19 bp, synthetic construct
  source 1..19: mol_type = other DNA
ctctaatccaggtttgcct

SEQ ID NO: 34114 - DNA, 19 bp, synthetic construct
  source 1..19: mol_type = other DNA
actctaatccaggtttgcc

SEQ ID NO: 34115 - DNA, 19 bp, synthetic construct
  source 1..19: mol_type = other DNA
aactctaatccaggtttgc

SEQ ID NO: 34116 - DNA, 19 bp, synthetic construct
  source 1..19: mol_type = other DNA
taactctaatccaggtttg

SEQ ID NO: 34117 - DNA, 19 bp, synthetic construct
  source 1..19: mol_type = other DNA
gtaactctaatccaggttt

SEQ ID NO: 34118 - DNA, 19 bp, synthetic construct
  source 1..19: mol_type = other DNA
tgtaactctaatccaggtt

SEQ ID NO: 34119 - DNA, 19 bp, synthetic construct
  source 1..19: mol_type = other DNA
atgtaactctaatccaggt

SEQ ID NO: 34120 - DNA, 19 bp, synthetic construct
  source 1..19: mol_type = other DNA
gatgtaactctaatccagg

SEQ ID NO: 34121 - DNA, 19 bp, synthetic construct
  source 1..19: mol_type = other DNA
agatgtaactctaatccag

SEQ ID NO: 34122 - DNA, 19 bp, synthetic construct
  source 1..19: mol_type = other DNA
gagatgtaactctaatcca

SEQ ID NO: 34123 - DNA, 19 bp, synthetic construct
  source 1..19: mol_type = other DNA
ggagatgtaactctaatcc

SEQ ID NO: 34124 - DNA, 19 bp, synthetic construct
  source 1..19: mol_type = other DNA
ccaggagatgtaactctaa

SEQ ID NO: 34125 - DNA, 19 bp, synthetic construct
  source 1..19: mol_type = other DNA
tccaggagatgtaactcta

SEQ ID NO: 34126 - DNA, 19 bp, synthetic construct
  source 1..19: mol_type = other DNA
atccaggagatgtaactct

SEQ ID NO: 34127 - DNA, 19 bp, synthetic construct
  source 1..19: mol_type = other DNA
catccaggagatgtaactc

SEQ ID NO: 34128 - DNA, 19 bp, synthetic construct
  source 1..19: mol_type = other DNA
tcatccaggagatgtaact

SEQ ID NO: 34129 - DNA, 19 bp, synthetic construct
  source 1..19: mol_type = other DNA
atcatccaggagatgtaac

SEQ ID NO: 34130 - DNA, 19 bp, synthetic construct
  source 1..19: mol_type = other DNA
aatcatccaggagatgtaa

SEQ ID NO: 34131 - DNA, 19 bp, synthetic construct
  source 1..19: mol_type = other DNA
taatcatccaggagatgta

SEQ ID NO: 34132 - DNA, 19 bp, synthetic construct
  source 1..19: mol_type = other DNA
ctaatcatccaggagatgt

SEQ ID NO: 34133 - DNA, 19 bp, synthetic construct
  source 1..19: mol_type = other DNA
actaatcatccaggagatg

SEQ ID NO: 34134 - DNA, 19 bp, synthetic construct
  source 1..19: mol_type = other DNA
aactaatcatccaggagat

SEQ ID NO: 34135 - DNA, 19 bp, synthetic construct
  source 1..19: mol_type = other DNA
gaactaatcatccaggaga

SEQ ID NO: 34136 - DNA, 19 bp, synthetic construct
  source 1..19: mol_type = other DNA
tgaactaatcatccaggag

SEQ ID NO: 34137 - DNA, 19 bp, synthetic construct
  source 1..19: mol_type = other DNA
ctgaactaatcatccagga

SEQ ID NO: 34138 - DNA, 19 bp, synthetic construct
  source 1..19: mol_type = other DNA
tctgaactaatcatccagg

SEQ ID NO: 34139 - DNA, 19 bp, synthetic construct
  source 1..19: mol_type = other DNA
ctctgaactaatcatccag

SEQ ID NO: 34140 - DNA, 19 bp, synthetic construct
  source 1..19: mol_type = other DNA
tctctgaactaatcatcca

SEQ ID NO: 34141 - DNA, 19 bp, synthetic construct
  source 1..19: mol_type = other DNA
atctctgaactaatcatcc

SEQ ID NO: 34142 - DNA, 19 bp, synthetic construct
  source 1..19: mol_type = other DNA
cacagggagggggcatttt

SEQ ID NO: 34143 - DNA, 19 bp, synthetic construct
  source 1..19: mol_type = other DNA
ccacagggagggggcattt

SEQ ID NO: 34144 - DNA, 19 bp, synthetic construct
  source 1..19: mol_type = other DNA
aggatccacagggaggggg

SEQ ID NO: 34145 - DNA, 19 bp, synthetic construct
  source 1..19: mol_type = other DNA
taggatccacagggagggg

SEQ ID NO: 34146 - DNA, 19 bp, synthetic construct
  source 1..19: mol_type = other DNA
ataggatccacagggaggg

SEQ ID NO: 34147 - DNA, 19 bp, synthetic construct
  source 1..19: mol_type = other DNA
tataggatccacagggagg

SEQ ID NO: 34148 - DNA, 19 bp, synthetic construct
  source 1..19: mol_type = other DNA
ctataggatccacagggag

SEQ ID NO: 34149 - DNA, 19 bp, synthetic construct
  source 1..19: mol_type = other DNA
tctataggatccacaggga

SEQ ID NO: 34150 - DNA, 19 bp, synthetic construct
  source 1..19: mol_type = other DNA
ttctataggatccacaggg

SEQ ID NO: 34151 - DNA, 19 bp, synthetic construct
  source 1..19: mol_type = other DNA
cttctataggatccacagg

SEQ ID NO: 34152 - DNA, 19 bp, synthetic construct
  source 1..19: mol_type = other DNA
tcttctataggatccacag

SEQ ID NO: 34153 - DNA, 19 bp, synthetic construct
  source 1..19: mol_type = other DNA
atcttctataggatccaca

SEQ ID NO: 34154 - DNA, 19 bp, synthetic construct
  source 1..19: mol_type = other DNA
aatcttctataggatccac

SEQ ID NO: 34155 - DNA, 19 bp, synthetic construct
  source 1..19: mol_type = other DNA
aaatcttctataggatcca

SEQ ID NO: 34156 - DNA, 19 bp, synthetic construct
  source 1..19: mol_type = other DNA
caaatcttctataggatcc

SEQ ID NO: 34157 - DNA, 19 bp, synthetic construct
  source 1..19: mol_type = other DNA
gcaaatcttctataggatc

SEQ ID NO: 34158 - DNA, 19 bp, synthetic construct
  source 1..19: mol_type = other DNA
gcactcatcacacaaaaga

SEQ ID NO: 34159 - DNA, 19 bp, synthetic construct
  source 1..19: mol_type = other DNA
ctgcactcatcacacaaaa

SEQ ID NO: 34160 - DNA, 19 bp, synthetic construct
  source 1..19: mol_type = other DNA
tctgcactcatcacacaaa

SEQ ID NO: 34161 - DNA, 19 bp, synthetic construct
  source 1..19: mol_type = other DNA
ctctgcactcatcacacaa

SEQ ID NO: 34162 - DNA, 19 bp, synthetic construct
  source 1..19: mol_type = other DNA
tctctgcactcatcacaca

SEQ ID NO: 34163 - DNA, 19 bp, synthetic construct
  source 1..19: mol_type = other DNA
atctctgcactcatcacac

SEQ ID NO: 34164 - DNA, 19 bp, synthetic construct
  source 1..19: mol_type = other DNA
tatctctgcactcatcaca

SEQ ID NO: 34165 - DNA, 19 bp, synthetic construct
  source 1..19: mol_type = other DNA
atatctctgcactcatcac

SEQ ID NO: 34166 - DNA, 19 bp, synthetic construct
  source 1..19: mol_type = other DNA
catatctctgcactcatca

SEQ ID NO: 34167 - DNA, 19 bp, synthetic construct
  source 1..19: mol_type = other DNA
acatatctctgcactcatc

SEQ ID NO: 34168 - DNA, 19 bp, synthetic construct
  source 1..19: mol_type = other DNA
gacatatctctgcactcat

SEQ ID NO: 34169 - DNA, 19 bp, synthetic construct
  source 1..19: mol_type = other DNA
tgacatatctctgcactca

SEQ ID NO: 34170 - DNA, 19 bp, synthetic construct
  source 1..19: mol_type = other DNA
gtgacatatctctgcactc

SEQ ID NO: 34171 - DNA, 19 bp, synthetic construct
  source 1..19: mol_type = other DNA
tgtgacatatctctgcact

SEQ ID NO: 34172 - DNA, 19 bp, synthetic construct
  source 1..19: mol_type = other DNA
ttgtgacatatctctgcac

SEQ ID NO: 34173 - DNA, 19 bp, synthetic construct
  source 1..19: mol_type = other DNA
attgtgacatatctctgca

SEQ ID NO: 34174 - DNA, 19 bp, synthetic construct
  source 1..19: mol_type = other DNA
tattgtgacatatctctgc

SEQ ID NO: 34175 - DNA, 19 bp, synthetic construct
  source 1..19: mol_type = other DNA
gatattgtgacatatctct

SEQ ID NO: 34176 - DNA, 19 bp, synthetic construct
  source 1..19: mol_type = other DNA
ggatattgtgacatatctc

SEQ ID NO: 34177 - DNA, 19 bp, synthetic construct
  source 1..19: mol_type = other DNA
gggatattgtgacatatct

SEQ ID NO: 34178 - DNA, 19 bp, synthetic construct
  source 1..19: mol_type = other DNA
ggggatattgtgacatatc

SEQ ID NO: 34179 - DNA, 19 bp, synthetic construct
  source 1..19: mol_type = other DNA
aggggatattgtgacatat

SEQ ID NO: 34180 - DNA, 19 bp, synthetic construct
  source 1..19: mol_type = other DNA
caggggatattgtgacata

SEQ ID NO: 34181 - DNA, 19 bp, synthetic construct
  source 1..19: mol_type = other DNA
acaggggatattgtgacat

SEQ ID NO: 34182 - DNA, 19 bp, synthetic construct
  source 1..19: mol_type = other DNA
tacaggggatattgtgaca

SEQ ID NO: 34183 - DNA, 19 bp, synthetic construct
  source 1..19: mol_type = other DNA
ctacaggggatattgtgac

SEQ ID NO: 34184 - DNA, 19 bp, synthetic construct
  source 1..19: mol_type = other DNA
tctacaggggatattgtga

SEQ ID NO: 34185 - DNA, 19 bp, synthetic construct
  source 1..19: mol_type = other DNA
ttctacaggggatattgtg

SEQ ID NO: 34186 - DNA, 19 bp, synthetic construct
  source 1..19: mol_type = other DNA
tttctacaggggatattgt

SEQ ID NO: 34187 - DNA, 19 bp, synthetic construct
  source 1..19: mol_type = other DNA
ttttctacaggggatattg

SEQ ID NO: 34188 - DNA, 19 bp, synthetic construct
  source 1..19: mol_type = other DNA
tttttctacaggggatatt

SEQ ID NO: 34189 - DNA, 19 bp, synthetic construct
  source 1..19: mol_type = other DNA
ctttttctacaggggatat

SEQ ID NO: 34190 - DNA, 19 bp, synthetic construct
  source 1..19: mol_type = other DNA
gctttttctacaggggata

SEQ ID NO: 34191 - DNA, 19 bp, synthetic construct
  source 1..19: mol_type = other DNA
ggctttttctacaggggat

SEQ ID NO: 34192 - DNA, 19 bp, synthetic construct
  source 1..19: mol_type = other DNA
aggctttttctacagggga

SEQ ID NO: 34193 - DNA, 19 bp, synthetic construct
  source 1..19: mol_type = other DNA
caggctttttctacagggg

SEQ ID NO: 34194 - DNA, 19 bp, synthetic construct
  source 1..19: mol_type = other DNA
tcaggctttttctacaggg

SEQ ID NO: 34195 - DNA, 19 bp, synthetic construct
  source 1..19: mol_type = other DNA
ttcaggctttttctacagg

SEQ ID NO: 34196 - DNA, 19 bp, synthetic construct
  source 1..19: mol_type = other DNA
tttcaggctttttctacag

SEQ ID NO: 34197 - DNA, 19 bp, synthetic construct
  source 1..19: mol_type = other DNA
atttcaggctttttctaca

SEQ ID NO: 34198 - DNA, 19 bp, synthetic construct
  source 1..19: mol_type = other DNA
aatttcaggctttttctac

SEQ ID NO: 34199 - DNA, 19 bp, synthetic construct
  source 1..19: mol_type = other DNA
caatttcaggctttttcta

SEQ ID NO: 34200 - DNA, 19 bp, synthetic construct
  source 1..19: mol_type = other DNA
tgcactgatcaccgaagtt

SEQ ID NO: 34201 - DNA, 19 bp, synthetic construct
  source 1..19: mol_type = other DNA
ctgcactgatcaccgaagt

SEQ ID NO: 34202 - DNA, 19 bp, synthetic construct
  source 1..19: mol_type = other DNA
tctgcactgatcaccgaag

SEQ ID NO: 34203 - DNA, 19 bp, synthetic construct
  source 1..19: mol_type = other DNA
atctgcactgatcaccgaa

SEQ ID NO: 34204 - DNA, 19 bp, synthetic construct
  source 1..19: mol_type = other DNA
catctgcactgatcaccga

SEQ ID NO: 34205 - DNA, 19 bp, synthetic construct
  source 1..19: mol_type = other DNA
acatctgcactgatcaccg

SEQ ID NO: 34206 - DNA, 19 bp, synthetic construct
  source 1..19: mol_type = other DNA
cacatctgcactgatcacc

SEQ ID NO: 34207 - DNA, 19 bp, synthetic construct
  source 1..19: mol_type = other DNA
acacatctgcactgatcac

SEQ ID NO: 34208 - DNA, 19 bp, synthetic construct
  source 1..19: mol_type = other DNA
aacacatctgcactgatca

SEQ ID NO: 34209 - DNA, 19 bp, synthetic construct
  source 1..19: mol_type = other DNA
aaacacatctgcactgatc

SEQ ID NO: 34210 - DNA, 19 bp, synthetic construct
  source 1..19: mol_type = other DNA
gaaacacatctgcactgat

SEQ ID NO: 34211 - DNA, 19 bp, synthetic construct
  source 1..19: mol_type = other DNA
tgaaacacatctgcactga

SEQ ID NO: 34212 - DNA, 19 bp, synthetic construct
  source 1..19: mol_type = other DNA
ctgaaacacatctgcactg

SEQ ID NO: 34213 - DNA, 19 bp, synthetic construct
  source 1..19: mol_type = other DNA
tctgaaacacatctgcact

SEQ ID NO: 34214 - DNA, 19 bp, synthetic construct
  source 1..19: mol_type = other DNA
ttctgaaacacatctgcac

SEQ ID NO: 34215 - DNA, 19 bp, synthetic construct
  source 1..19: mol_type = other DNA
gttctgaaacacatctgca

SEQ ID NO: 34216 - DNA, 19 bp, synthetic construct
  source 1..19: mol_type = other DNA
agttctgaaacacatctgc

SEQ ID NO: 34217 - DNA, 19 bp, synthetic construct
  source 1..19: mol_type = other DNA
gagttctgaaacacatctg

SEQ ID NO: 34218 - DNA, 19 bp, synthetic construct
  source 1..19: mol_type = other DNA
ggagttctgaaacacatct

SEQ ID NO: 34219 - DNA, 19 bp, synthetic construct
  source 1..19: mol_type = other DNA
tggagttctgaaacacatc

SEQ ID NO: 34220 - DNA, 19 bp, synthetic construct
  source 1..19: mol_type = other DNA
ctatggagttctgaaacac

SEQ ID NO: 34221 - DNA, 19 bp, synthetic construct
  source 1..19: mol_type = other DNA
tctactatggagttctgaa

SEQ ID NO: 34222 - DNA, 19 bp, synthetic construct
  source 1..19: mol_type = other DNA
gtctactatggagttctga

SEQ ID NO: 34223 - DNA, 19 bp, synthetic construct
  source 1..19: mol_type = other DNA
agtctactatggagttctg

SEQ ID NO: 34224 - DNA, 19 bp, synthetic construct
  source 1..19: mol_type = other DNA
cagtctactatggagttct

SEQ ID NO: 34225 - DNA, 19 bp, synthetic construct
  source 1..19: mol_type = other DNA
tcagtctactatggagttc

SEQ ID NO: 34226 - DNA, 19 bp, synthetic construct
  source 1..19: mol_type = other DNA
ttcagtctactatggagtt

SEQ ID NO: 34227 - DNA, 19 bp, synthetic construct
  source 1..19: mol_type = other DNA
gttcagtctactatggagt

SEQ ID NO: 34228 - DNA, 19 bp, synthetic construct
  source 1..19: mol_type = other DNA
ggttcagtctactatggag

SEQ ID NO: 34229 - DNA, 19 bp, synthetic construct
  source 1..19: mol_type = other DNA
aggttcagtctactatgga

SEQ ID NO: 34230 - DNA, 19 bp, synthetic construct
  source 1..19: mol_type = other DNA
taggttcagtctactatgg

SEQ ID NO: 34231 - DNA, 19 bp, synthetic construct
  source 1..19: mol_type = other DNA
ctaggttcagtctactatg

SEQ ID NO: 34232 - DNA, 19 bp, synthetic construct
  source 1..19: mol_type = other DNA
tctaggttcagtctactat

SEQ ID NO: 34233 - DNA, 19 bp, synthetic construct
  source 1..19: mol_type = other DNA
ctctaggttcagtctacta

SEQ ID NO: 34234 - DNA, 19 bp, synthetic construct
  source 1..19: mol_type = other DNA
tctctaggttcagtctact

SEQ ID NO: 34235 - DNA, 19 bp, synthetic construct
  source 1..19: mol_type = other DNA
ttctctaggttcagtctac

SEQ ID NO: 34236 - DNA, 19 bp, synthetic construct
  source 1..19: mol_type = other DNA
attctctaggttcagtcta

SEQ ID NO: 34237 - DNA, 19 bp, synthetic construct
  source 1..19: mol_type = other DNA
cattctctaggttcagtct

SEQ ID NO: 34238 - DNA, 19 bp, synthetic construct
  source 1..19: mol_type = other DNA
ccattctctaggttcagtc

SEQ ID NO: 34239 - DNA, 19 bp, synthetic construct
  source 1..19: mol_type = other DNA
accattctctaggttcagt

SEQ ID NO: 34240 - DNA, 19 bp, synthetic construct
  source 1..19: mol_type = other DNA
aaccattctctaggttcag

SEQ ID NO: 34241 - DNA, 19 bp, synthetic construct
  source 1..19: mol_type = other DNA
taaccattctctaggttca

SEQ ID NO: 34242 - DNA, 19 bp, synthetic construct
  source 1..19: mol_type = other DNA
gtaaccattctctaggttc

SEQ ID NO: 34243 - DNA, 19 bp, synthetic construct
  source 1..19: mol_type = other DNA
tgtaaccattctctaggtt

SEQ ID NO: 34244 - DNA, 19 bp, synthetic construct
  source 1..19: mol_type = other DNA
atgtaaccattctctaggt

SEQ ID NO: 34245 - DNA, 19 bp, synthetic construct
  source 1..19: mol_type = other DNA
gatgtaaccattctctagg

SEQ ID NO: 34246 - DNA, 19 bp, synthetic construct
  source 1..19: mol_type = other DNA
tgatgtaaccattctctag

SEQ ID NO: 34247 - DNA, 19 bp, synthetic construct
  source 1..19: mol_type = other DNA
gtgatgtaaccattctcta

SEQ ID NO: 34248 - DNA, 19 bp, synthetic construct
  source 1..19: mol_type = other DNA
agtgatgtaaccattctct

SEQ ID NO: 34249 - DNA, 19 bp, synthetic construct
  source 1..19: mol_type = other DNA
aagtgatgtaaccattctc

SEQ ID NO: 34250 - DNA, 19 bp, synthetic construct
  source 1..19: mol_type = other DNA
cctaagtgatgtaaccatt

SEQ ID NO: 34251 - DNA, 19 bp, synthetic construct
  source 1..19: mol_type = other DNA
acctaagtgatgtaaccat

SEQ ID NO: 34252 - DNA, 19 bp, synthetic construct
  source 1..19: mol_type = other DNA
cacctaagtgatgtaacca

SEQ ID NO: 34253 - DNA, 19 bp, synthetic construct
  source 1..19: mol_type = other DNA
tcacctaagtgatgtaacc

SEQ ID NO: 34254 - DNA, 19 bp, synthetic construct
  source 1..19: mol_type = other DNA
atcacctaagtgatgtaac

SEQ ID NO: 34255 - DNA, 19 bp, synthetic construct
  source 1..19: mol_type = other DNA
gatcacctaagtgatgtaa

SEQ ID NO: 34256 - DNA, 19 bp, synthetic construct
  source 1..19: mol_type = other DNA
tgatcacctaagtgatgta

SEQ ID NO: 34257 - DNA, 19 bp, synthetic construct
  source 1..19: mol_type = other DNA
ctgatcacctaagtgatgt

SEQ ID NO: 34258 - DNA, 19 bp, synthetic construct
  source 1..19: mol_type = other DNA
actgatcacctaagtgatg

SEQ ID NO: 34259 - DNA, 19 bp, synthetic construct
  source 1..19: mol_type = other DNA
cactgatcacctaagtgat

SEQ ID NO: 34260 - DNA, 19 bp, synthetic construct
  source 1..19: mol_type = other DNA
acactgatcacctaagtga

SEQ ID NO: 34261 - DNA, 19 bp, synthetic construct
  source 1..19: mol_type = other DNA
tacactgatcacctaagtg

SEQ ID NO: 34262 - DNA, 19 bp, synthetic construct
  source 1..19: mol_type = other DNA
ctacactgatcacctaagt

SEQ ID NO: 34263 - DNA, 19 bp, synthetic construct
  source 1..19: mol_type = other DNA
tctacactgatcacctaag

SEQ ID NO: 34264 - DNA, 19 bp, synthetic construct
  source 1..19: mol_type = other DNA
ctctacactgatcacctaa

SEQ ID NO: 34265 - DNA, 19 bp, synthetic construct
  source 1..19: mol_type = other DNA
tctctacactgatcaccta

SEQ ID NO: 34266 - DNA, 19 bp, synthetic construct
  source 1..19: mol_type = other DNA
atctctacactgatcacct

SEQ ID NO: 34267 - DNA, 19 bp, synthetic construct
  source 1..19: mol_type = other DNA
tatctctacactgatcacc

SEQ ID NO: 34268 - DNA, 19 bp, synthetic construct
  source 1..19: mol_type = other DNA
atatctctacactgatcac

SEQ ID NO: 34269 - DNA, 19 bp, synthetic construct
  source 1..19: mol_type = other DNA
catatctctacactgatca

SEQ ID NO: 34270 - DNA, 19 bp, synthetic construct
  source 1..19: mol_type = other DNA
acatatctctacactgatc

SEQ ID NO: 34271 - DNA, 19 bp, synthetic construct
  source 1..19: mol_type = other DNA
ctgtctacacgagaatttt

SEQ ID NO: 34272 - DNA, 19 bp, synthetic construct
  source 1..19: mol_type = other DNA
tctgtctacacgagaattt

SEQ ID NO: 34273 - DNA, 19 bp, synthetic construct
  source 1..19: mol_type = other DNA
ctctgtctacacgagaatt

SEQ ID NO: 34274 - DNA, 19 bp, synthetic construct
  source 1..19: mol_type = other DNA
gctctgtctacacgagaat

SEQ ID NO: 34275 - DNA, 19 bp, synthetic construct
  source 1..19: mol_type = other DNA
ggctctgtctacacgagaa

SEQ ID NO: 34276 - DNA, 19 bp, synthetic construct
  source 1..19: mol_type = other DNA
aggctctgtctacacgaga

SEQ ID NO: 34277 - DNA, 19 bp, synthetic construct
  source 1..19: mol_type = other DNA
taggctctgtctacacgag

SEQ ID NO: 34278 - DNA, 19 bp, synthetic construct
  source 1..19: mol_type = other DNA
ctaggctctgtctacacga

SEQ ID NO: 34279 - DNA, 19 bp, synthetic construct
  source 1..19: mol_type = other DNA
tctaggctctgtctacacg

SEQ ID NO: 34280 - DNA, 19 bp, synthetic construct
  source 1..19: mol_type = other DNA
gtctaggctctgtctacac

SEQ ID NO: 34281 - DNA, 19 bp, synthetic construct
  source 1..19: mol_type = other DNA
tgtctaggctctgtctaca

SEQ ID NO: 34282 - DNA, 19 bp, synthetic construct
  source 1..19: mol_type = other DNA
ttgtctaggctctgtctac

SEQ ID NO: 34283 - DNA, 19 bp, synthetic construct
  source 1..19: mol_type = other DNA
attgtctaggctctgtcta

SEQ ID NO: 34284 - DNA, 19 bp, synthetic construct
  source 1..19: mol_type = other DNA
aattgtctaggctctgtct

SEQ ID NO: 34285 - DNA, 19 bp, synthetic construct
  source 1..19: mol_type = other DNA
caattgtctaggctctgtc

SEQ ID NO: 34286 - DNA, 19 bp, synthetic construct
  source 1..19: mol_type = other DNA
acaattgtctaggctctgt

SEQ ID NO: 34287 - DNA, 19 bp, synthetic construct
  source 1..19: mol_type = other DNA
aacaattgtctaggctctg

SEQ ID NO: 34288 - DNA, 19 bp, synthetic construct
  source 1..19: mol_type = other DNA
taacaattgtctaggctct

SEQ ID NO: 34289 - DNA, 19 bp, synthetic construct
  source 1..19: mol_type = other DNA
gtaacaattgtctaggctc

SEQ ID NO: 34290 - DNA, 19 bp, synthetic construct
  source 1..19: mol_type = other DNA
tgtaacaattgtctaggct

SEQ ID NO: 34291 - DNA, 19 bp, synthetic construct
  source 1..19: mol_type = other DNA
atgtaacaattgtctaggc

SEQ ID NO: 34292 - DNA, 19 bp, synthetic construct
  source 1..19: mol_type = other DNA
ggtgatgtaacaattgtct

SEQ ID NO: 34293 - DNA, 19 bp, synthetic construct
  source 1..19: mol_type = other DNA
tcactaggtgatgtaacaa

SEQ ID NO: 34294 - DNA, 19 bp, synthetic construct
  source 1..19: mol_type = other DNA
atcactaggtgatgtaaca

SEQ ID NO: 34295 - DNA, 19 bp, synthetic construct
  source 1..19: mol_type = other DNA
gatcactaggtgatgtaac

SEQ ID NO: 34296 - DNA, 19 bp, synthetic construct
  source 1..19: mol_type = other DNA
tgatcactaggtgatgtaa

SEQ ID NO: 34297 - DNA, 19 bp, synthetic construct
  source 1..19: mol_type = other DNA
ctgatcactaggtgatgta

SEQ ID NO: 34298 - DNA, 19 bp, synthetic construct
  source 1..19: mol_type = other DNA
actgatcactaggtgatgt

SEQ ID NO: 34299 - DNA, 19 bp, synthetic construct
  source 1..19: mol_type = other DNA
cactgatcactaggtgatg

SEQ ID NO: 34300 - DNA, 19 bp, synthetic construct
  source 1..19: mol_type = other DNA
gcactgatcactaggtgat

SEQ ID NO: 34301 - DNA, 19 bp, synthetic construct
  source 1..19: mol_type = other DNA
tgcactgatcactaggtga

SEQ ID NO: 34302 - DNA, 19 bp, synthetic construct
  source 1..19: mol_type = other DNA
ctgcactgatcactaggtg

SEQ ID NO: 34303 - DNA, 19 bp, synthetic construct
  source 1..19: mol_type = other DNA
cctgcactgatcactaggt

SEQ ID NO: 34304 - DNA, 19 bp, synthetic construct
  source 1..19: mol_type = other DNA
ccctgcactgatcactagg

SEQ ID NO: 34305 - DNA, 19 bp, synthetic construct
  source 1..19: mol_type = other DNA
tccctgcactgatcactag

SEQ ID NO: 34306 - DNA, 19 bp, synthetic construct
  source 1..19: mol_type = other DNA
atccctgcactgatcacta

SEQ ID NO: 34307 - DNA, 19 bp, synthetic construct
  source 1..19: mol_type = other DNA
tatccctgcactgatcact

SEQ ID NO: 34308 - DNA, 19 bp, synthetic construct
  source 1..19: mol_type = other DNA
ttatccctgcactgatcac

SEQ ID NO: 34309 - DNA, 19 bp, synthetic construct
  source 1..19: mol_type = other DNA
cttatccctgcactgatca

SEQ ID NO: 34310 - DNA, 19 bp, synthetic construct
  source 1..19: mol_type = other DNA
acttatccctgcactgatc

SEQ ID NO: 34311 - DNA, 19 bp, synthetic construct
  source 1..19: mol_type = other DNA
gacttatccctgcactgat

SEQ ID NO: 34312 - DNA, 19 bp, synthetic construct
  source 1..19: mol_type = other DNA
tgacttatccctgcactga

SEQ ID NO: 34313 - DNA, 19 bp, synthetic construct
  source 1..19: mol_type = other DNA
atgacttatccctgcactg

SEQ ID NO: 34314 - DNA, 19 bp, synthetic construct
  source 1..19: mol_type = other DNA
tatgacttatccctgcact

SEQ ID NO: 34315 - DNA, 19 bp, synthetic construct
  source 1..19: mol_type = other DNA
ttatgacttatccctgcac

SEQ ID NO: 34316 - DNA, 19 bp, synthetic construct
  source 1..19: mol_type = other DNA
tttatgacttatccctgca

SEQ ID NO: 34317 - DNA, 19 bp, synthetic construct
  source 1..19: mol_type = other DNA
ctttatgacttatccctgc

SEQ ID NO: 34318 - DNA, 19 bp, synthetic construct
  source 1..19: mol_type = other DNA
gctttatgacttatccctg

SEQ ID NO: 34319 - DNA, 19 bp, synthetic construct
  source 1..19: mol_type = other DNA
ggctttatgacttatccct

SEQ ID NO: 34320 - DNA, 19 bp, synthetic construct
  source 1..19: mol_type = other DNA
aggctttatgacttatccc

SEQ ID NO: 34321 - DNA, 19 bp, synthetic construct
  source 1..19: mol_type = other DNA
gaggctttatgacttatcc

SEQ ID NO: 34322 - DNA, 19 bp, synthetic construct
  source 1..19: mol_type = other DNA
ggaggctttatgacttatc

SEQ ID NO: 34323 - DNA, 19 bp, synthetic construct
  source 1..19: mol_type = other DNA
aggaggctttatgacttat

SEQ ID NO: 34324 - DNA, 19 bp, synthetic construct
  source 1..19: mol_type = other DNA
caggaggctttatgactta

SEQ ID NO: 34325 - DNA, 19 bp, synthetic construct
  source 1..19: mol_type = other DNA
acaggaggctttatgactt

SEQ ID NO: 34326 - DNA, 19 bp, synthetic construct
  source 1..19: mol_type = other DNA
tacaggaggctttatgact

SEQ ID NO: 34327 - DNA, 19 bp, synthetic construct
  source 1..19: mol_type = other DNA
ctacaggaggctttatgac

SEQ ID NO: 34328 - DNA, 19 bp, synthetic construct
  source 1..19: mol_type = other DNA
cctacaggaggctttatga

SEQ ID NO: 34329 - DNA, 19 bp, synthetic construct
  source 1..19: mol_type = other DNA
gcctacaggaggctttatg

SEQ ID NO: 34330 - DNA, 19 bp, synthetic construct
  source 1..19: mol_type = other DNA
tgcctacaggaggctttat

SEQ ID NO: 34331 - DNA, 19 bp, synthetic construct
  source 1..19: mol_type = other DNA
ctgcctacaggaggcttta

SEQ ID NO: 34332 - DNA, 19 bp, synthetic construct
  source 1..19: mol_type = other DNA
tctgcctacaggaggcttt

SEQ ID NO: 34333 - DNA, 19 bp, synthetic construct
  source 1..19: mol_type = other DNA
ctctgcctacaggaggctt

SEQ ID NO: 34334 - DNA, 19 bp, synthetic construct
  source 1..19: mol_type = other DNA
actctgcctacaggaggct

SEQ ID NO: 34335 - DNA, 19 bp, synthetic construct
  source 1..19: mol_type = other DNA
cactctgcctacaggaggc

SEQ ID NO: 34336 - DNA, 19 bp, synthetic construct
  source 1..19: mol_type = other DNA
acactctgcctacaggagg

SEQ ID NO: 34337 - DNA, 19 bp, synthetic construct
  source 1..19: mol_type = other DNA
tacactctgcctacaggag

SEQ ID NO: 34338 - DNA, 19 bp, synthetic construct
  source 1..19: mol_type = other DNA
ctacactctgcctacagga

SEQ ID NO: 34339 - DNA, 19 bp, synthetic construct
  source 1..19: mol_type = other DNA
cctacactctgcctacagg

SEQ ID NO: 34340 - DNA, 19 bp, synthetic construct
  source 1..19: mol_type = other DNA
gcctacactctgcctacag

SEQ ID NO: 34341 - DNA, 19 bp, synthetic construct
  source 1..19: mol_type = other DNA
tgcctacactctgcctaca

SEQ ID NO: 34342 - DNA, 19 bp, synthetic construct
  source 1..19: mol_type = other DNA
ttgcctacactctgcctac

SEQ ID NO: 34343 - DNA, 19 bp, synthetic construct
  source 1..19: mol_type = other DNA
cttgcctacactctgccta

SEQ ID NO: 34344 - DNA, 19 bp, synthetic construct
  source 1..19: mol_type = other DNA
acttgcctacactctgcct

SEQ ID NO: 34345 - DNA, 19 bp, synthetic construct
  source 1..19: mol_type = other DNA
cacttgcctacactctgcc

SEQ ID NO: 34346 - DNA, 19 bp, synthetic construct
  source 1..19: mol_type = other DNA
acacttgcctacactctgc

SEQ ID NO: 34347 - DNA, 19 bp, synthetic construct
  source 1..19: mol_type = other DNA
aacacttgcctacactctg

SEQ ID NO: 34348 - DNA, 19 bp, synthetic construct
  source 1..19: mol_type = other DNA
gaacacttgcctacactct

SEQ ID NO: 34349 - DNA, 19 bp, synthetic construct
  source 1..19: mol_type = other DNA
ggaacacttgcctacactc

SEQ ID NO: 34350 - DNA, 19 bp, synthetic construct
  source 1..19: mol_type = other DNA
gggaacacttgcctacact

SEQ ID NO: 34351 - DNA, 19 bp, synthetic construct
  source 1..19: mol_type = other DNA
agggaacacttgcctacac

SEQ ID NO: 34352 - DNA, 19 bp, synthetic construct
  source 1..19: mol_type = other DNA
gagggaacacttgcctaca

SEQ ID NO: 34353 - DNA, 19 bp, synthetic construct
  source 1..19: mol_type = other DNA
ggagggaacacttgcctac

SEQ ID NO: 34354 - DNA, 19 bp, synthetic construct
  source 1..19: mol_type = other DNA
gggagggaacacttgccta

SEQ ID NO: 34355 - DNA, 19 bp, synthetic construct
  source 1..19: mol_type = other DNA
agggagggaacacttgcct

SEQ ID NO: 34356 - DNA, 19 bp, synthetic construct
  source 1..19: mol_type = other DNA
cagggagggaacacttgcc

SEQ ID NO: 34357 - DNA, 19 bp, synthetic construct
  source 1..19: mol_type = other DNA
ccagggagggaacacttgc

SEQ ID NO: 34358 - DNA, 19 bp, synthetic construct
  source 1..19: mol_type = other DNA
cccagggagggaacacttg

SEQ ID NO: 34359 - DNA, 19 bp, synthetic construct
  source 1..19: mol_type = other DNA
gcccagggagggaacactt

SEQ ID NO: 34360 - DNA, 19 bp, synthetic construct
  source 1..19: mol_type = other DNA
agcccagggagggaacact

SEQ ID NO: 34361 - DNA, 19 bp, synthetic construct
  source 1..19: mol_type = other DNA
cagcccagggagggaacac

SEQ ID NO: 34362 - DNA, 19 bp, synthetic construct
  source 1..19: mol_type = other DNA
tcagcccagggagggaaca

SEQ ID NO: 34363 - DNA, 19 bp, synthetic construct
  source 1..19: mol_type = other DNA
atcagcccagggagggaac

SEQ ID NO: 34364 - DNA, 19 bp, synthetic construct
  source 1..19: mol_type = other DNA
gatcagcccagggagggaa

SEQ ID NO: 34365 - DNA, 19 bp, synthetic construct
  source 1..19: mol_type = other DNA
tgatcagcccagggaggga

SEQ ID NO: 34366 - DNA, 19 bp, synthetic construct
  source 1..19: mol_type = other DNA
actgatcagcccagggagg

SEQ ID NO: 34367 - DNA, 19 bp, synthetic construct
  source 1..19: mol_type = other DNA
cactgatcagcccagggag

SEQ ID NO: 34368 - DNA, 19 bp, synthetic construct
  source 1..19: mol_type = other DNA
tgcactgatcagcccaggg

SEQ ID NO: 34369 - DNA, 19 bp, synthetic construct
  source 1..19: mol_type = other DNA
ctgcactgatcagcccagg

SEQ ID NO: 34370 - DNA, 19 bp, synthetic construct
  source 1..19: mol_type = other DNA
tctgcactgatcagcccag

SEQ ID NO: 34371 - DNA, 19 bp, synthetic construct
  source 1..19: mol_type = other DNA
ctctgcactgatcagccca

SEQ ID NO: 34372 - DNA, 19 bp, synthetic construct
  source 1..19: mol_type = other DNA
tctctgcactgatcagccc

SEQ ID NO: 34373 - DNA, 19 bp, synthetic construct
  source 1..19: mol_type = other DNA
atctctgcactgatcagcc

SEQ ID NO: 34374 - DNA, 19 bp, synthetic construct
  source 1..19: mol_type = other DNA
tatctctgcactgatcagc

SEQ ID NO: 34375 - DNA, 19 bp, synthetic construct
  source 1..19: mol_type = other DNA
atatctctgcactgatcag

SEQ ID NO: 34376 - DNA, 19 bp, synthetic construct
  source 1..19: mol_type = other DNA
gatatctctgcactgatca

SEQ ID NO: 34377 - DNA, 19 bp, synthetic construct
  source 1..19: mol_type = other DNA
agatatctctgcactgatc

SEQ ID NO: 34378 - DNA, 19 bp, synthetic construct
  source 1..19: mol_type = other DNA
gagatatctctgcactgat

SEQ ID NO: 34379 - DNA, 19 bp, synthetic construct
  source 1..19: mol_type = other DNA
tgagatatctctgcactga

SEQ ID NO: 34380 - DNA, 19 bp, synthetic construct
  source 1..19: mol_type = other DNA
gtgagatatctctgcactg

SEQ ID NO: 34381 - DNA, 19 bp, synthetic construct
  source 1..19: mol_type = other DNA
tgtgagatatctctgcact

SEQ ID NO: 34382 - DNA, 19 bp, synthetic construct
  source 1..19: mol_type = other DNA
ttgtgagatatctctgcac

SEQ ID NO: 34383 - DNA, 19 bp, synthetic construct
  source 1..19: mol_type = other DNA
tttgtgagatatctctgca

SEQ ID NO: 34384 - DNA, 19 bp, synthetic construct
  source 1..19: mol_type = other DNA
ctttgtgagatatctctgc

SEQ ID NO: 34385 - DNA, 19 bp, synthetic construct
  source 1..19: mol_type = other DNA
gctttgtgagatatctctg

SEQ ID NO: 34386 - DNA, 19 bp, synthetic construct
  source 1..19: mol_type = other DNA
ggctttgtgagatatctct

SEQ ID NO: 34387 - DNA, 19 bp, synthetic construct
  source 1..19: mol_type = other DNA
gggctttgtgagatatctc

SEQ ID NO: 34388 - DNA, 19 bp, synthetic construct
  source 1..19: mol_type = other DNA
ggggctttgtgagatatct

SEQ ID NO: 34389 - DNA, 19 bp, synthetic construct
  source 1..19: mol_type = other DNA
aggggctttgtgagatatc

SEQ ID NO: 34390 - DNA, 19 bp, synthetic construct
  source 1..19: mol_type = other DNA
taggggctttgtgagatat

SEQ ID NO: 34391 - DNA, 19 bp, synthetic construct
  source 1..19: mol_type = other DNA
ataggggctttgtgagata

SEQ ID NO: 34392 - DNA, 19 bp, synthetic construct
  source 1..19: mol_type = other DNA
tataggggctttgtgagat

SEQ ID NO: 34393 - DNA, 19 bp, synthetic construct
  source 1..19: mol_type = other DNA
ttataggggctttgtgaga

SEQ ID NO: 34394 - DNA, 19 bp, synthetic construct
  source 1..19: mol_type = other DNA
cttataggggctttgtgag

SEQ ID NO: 34395 - DNA, 19 bp, synthetic construct
  source 1..19: mol_type = other DNA
gcttataggggctttgtga

SEQ ID NO: 34396 - DNA, 19 bp, synthetic construct
  source 1..19: mol_type = other DNA
ggcttataggggctttgtg

SEQ ID NO: 34397 - DNA, 19 bp, synthetic construct
  source 1..19: mol_type = other DNA
tggcttataggggctttgt

SEQ ID NO: 34398 - DNA, 19 bp, synthetic construct
  source 1..19: mol_type = other DNA
ttggcttataggggctttg

SEQ ID NO: 34399 - DNA, 19 bp, synthetic construct
  source 1..19: mol_type = other DNA
tttggcttataggggcttt

SEQ ID NO: 34400 - DNA, 19 bp, synthetic construct
  source 1..19: mol_type = other DNA
gtttggcttataggggctt

SEQ ID NO: 34401 - DNA, 19 bp, synthetic construct
  source 1..19: mol_type = other DNA
ggtttggcttataggggct

SEQ ID NO: 34402 - DNA, 19 bp, synthetic construct
  source 1..19: mol_type = other DNA
aggtttggcttataggggc

SEQ ID NO: 34403 - DNA, 19 bp, synthetic construct
  source 1..19: mol_type = other DNA
aaggtttggcttatagggg

SEQ ID NO: 34404 - DNA, 19 bp, synthetic construct
  source 1..19: mol_type = other DNA
caaggtttggcttataggg

SEQ ID NO: 34405 - DNA, 19 bp, synthetic construct
  source 1..19: mol_type = other DNA
tcaaggtttggcttatagg

SEQ ID NO: 34406 - DNA, 19 bp, synthetic construct
  source 1..19: mol_type = other DNA
gtcaaggtttggcttatag

SEQ ID NO: 34407 - DNA, 19 bp, synthetic construct
  source 1..19: mol_type = other DNA
tgtcaaggtttggcttata

SEQ ID NO: 34408 - DNA, 19 bp, synthetic construct
  source 1..19: mol_type = other DNA
ttgtcaaggtttggcttat

SEQ ID NO: 34409 - DNA, 19 bp, synthetic construct
  source 1..19: mol_type = other DNA
cttgtcaaggtttggctta

SEQ ID NO: 34410 - DNA, 19 bp, synthetic construct
  source 1..19: mol_type = other DNA
ccttgtcaaggtttggctt

SEQ ID NO: 34411 - DNA, 19 bp, synthetic construct
  source 1..19: mol_type = other DNA
cccttgtcaaggtttggct

SEQ ID NO: 34412 - DNA, 19 bp, synthetic construct
  source 1..19: mol_type = other DNA
acccttgtcaaggtttggc

SEQ ID NO: 34413 - DNA, 19 bp, synthetic construct
  source 1..19: mol_type = other DNA
aacccttgtcaaggtttgg

SEQ ID NO: 34414 - DNA, 19 bp, synthetic construct
  source 1..19: mol_type = other DNA
taacccttgtcaaggtttg

SEQ ID NO: 34415 - DNA, 19 bp, synthetic construct
  source 1..19: mol_type = other DNA
gtaacccttgtcaaggttt

SEQ ID NO: 34416 - DNA, 19 bp, synthetic construct
  source 1..19: mol_type = other DNA
tgtaacccttgtcaaggtt

SEQ ID NO: 34417 - DNA, 19 bp, synthetic construct
  source 1..19: mol_type = other DNA
atgtaacccttgtcaaggt

SEQ ID NO: 34418 - DNA, 19 bp, synthetic construct
  source 1..19: mol_type = other DNA
gatgtaacccttgtcaagg

SEQ ID NO: 34419 - DNA, 19 bp, synthetic construct
  source 1..19: mol_type = other DNA
tgatgtaacccttgtcaag

SEQ ID NO: 34420 - DNA, 19 bp, synthetic construct
  source 1..19: mol_type = other DNA
gtgatgtaacccttgtcaa

SEQ ID NO: 34421 - DNA, 19 bp, synthetic construct
  source 1..19: mol_type = other DNA
ggtgatgtaacccttgtca

SEQ ID NO: 34422 - DNA, 19 bp, synthetic construct
  source 1..19: mol_type = other DNA
aggtgatgtaacccttgtc

SEQ ID NO: 34423 - DNA, 19 bp, synthetic construct
  source 1..19: mol_type = other DNA
caggtgatgtaacccttgt

SEQ ID NO: 34424 - DNA, 19 bp, synthetic construct
  source 1..19: mol_type = other DNA
acaggtgatgtaacccttg

SEQ ID NO: 34425 - DNA, 19 bp, synthetic construct
  source 1..19: mol_type = other DNA
aacaggtgatgtaaccctt

SEQ ID NO: 34426 - DNA, 19 bp, synthetic construct
  source 1..19: mol_type = other DNA
aaacaggtgatgtaaccct

SEQ ID NO: 34427 - DNA, 19 bp, synthetic construct
  source 1..19: mol_type = other DNA
caaacaggtgatgtaaccc

SEQ ID NO: 34428 - DNA, 19 bp, synthetic construct
  source 1..19: mol_type = other DNA
tcaaacaggtgatgtaacc

SEQ ID NO: 34429 - DNA, 19 bp, synthetic construct
  source 1..19: mol_type = other DNA
gctcaaacaggtgatgtaa

SEQ ID NO: 34430 - DNA, 19 bp, synthetic construct
  source 1..19: mol_type = other DNA
tgctcaaacaggtgatgta

SEQ ID NO: 34431 - DNA, 19 bp, synthetic construct
  source 1..19: mol_type = other DNA
ctgctcaaacaggtgatgt

SEQ ID NO: 34432 - DNA, 19 bp, synthetic construct
  source 1..19: mol_type = other DNA
actgctcaaacaggtgatg

SEQ ID NO: 34433 - DNA, 19 bp, synthetic construct
  source 1..19: mol_type = other DNA
cactgctcaaacaggtgat

SEQ ID NO: 34434 - DNA, 19 bp, synthetic construct
  source 1..19: mol_type = other DNA
ccactgctcaaacaggtga

SEQ ID NO: 34435 - DNA, 19 bp, synthetic construct
  source 1..19: mol_type = other DNA
tccactgctcaaacaggtg

SEQ ID NO: 34436 - DNA, 19 bp, synthetic construct
  source 1..19: mol_type = other DNA
ttccactgctcaaacaggt

SEQ ID NO: 34437 - DNA, 19 bp, synthetic construct
  source 1..19: mol_type = other DNA
tttccactgctcaaacagg

SEQ ID NO: 34438 - DNA, 19 bp, synthetic construct
  source 1..19: mol_type = other DNA
atttccactgctcaaacag

SEQ ID NO: 34439 - DNA, 19 bp, synthetic construct
  source 1..19: mol_type = other DNA
tatttccactgctcaaaca

SEQ ID NO: 34440 - DNA, 19 bp, synthetic construct
  source 1..19: mol_type = other DNA
atatttccactgctcaaac

SEQ ID NO: 34441 - DNA, 19 bp, synthetic construct
  source 1..19: mol_type = other DNA
tatatttccactgctcaaa

SEQ ID NO: 34442 - DNA, 19 bp, synthetic construct
  source 1..19: mol_type = other DNA
atatatttccactgctcaa

SEQ ID NO: 34443 - DNA, 19 bp, synthetic construct
  source 1..19: mol_type = other DNA
tatatatttccactgctca

SEQ ID NO: 34444 - DNA, 19 bp, synthetic construct
  source 1..19: mol_type = other DNA
atatatatttccactgctc

SEQ ID NO: 34445 - DNA, 19 bp, synthetic construct
  source 1..19: mol_type = other DNA
gatatatatttccactgct

SEQ ID NO: 34446 - DNA, 19 bp, synthetic construct
  source 1..19: mol_type = other DNA
tgatatatatttccactgc

SEQ ID NO: 34447 - DNA, 19 bp, synthetic construct
  source 1..19: mol_type = other DNA
gtgatatatatttccactg

SEQ ID NO: 34448 - DNA, 19 bp, synthetic construct
  source 1..19: mol_type = other DNA
ggctttgtgatatatattt

SEQ ID NO: 34449 - DNA, 19 bp, synthetic construct
  source 1..19: mol_type = other DNA
gggctttgtgatatatatt

SEQ ID NO: 34450 - DNA, 19 bp, synthetic construct
  source 1..19: mol_type = other DNA
ggggctttgtgatatatat

SEQ ID NO: 34451 - DNA, 19 bp, synthetic construct
  source 1..19: mol_type = other DNA
gggggctttgtgatatata

SEQ ID NO: 34452 - DNA, 19 bp, synthetic construct
  source 1..19: mol_type = other DNA
agggggctttgtgatatat

SEQ ID NO: 34453 - DNA, 19 bp, synthetic construct
  source 1..19: mol_type = other DNA
cagggggctttgtgatata

SEQ ID NO: 34454 - DNA, 19 bp, synthetic construct
  source 1..19: mol_type = other DNA
acagggggctttgtgatat

SEQ ID NO: 34455 - DNA, 19 bp, synthetic construct
  source 1..19: mol_type = other DNA
tacagggggctttgtgata

SEQ ID NO: 34456 - DNA, 19 bp, synthetic construct
  source 1..19: mol_type = other DNA
ctacagggggctttgtgat

SEQ ID NO: 34457 - DNA, 19 bp, synthetic construct
  source 1..19: mol_type = other DNA
tctacagggggctttgtga

SEQ ID NO: 34458 - DNA, 19 bp, synthetic construct
  source 1..19: mol_type = other DNA
gtctacagggggctttgtg

SEQ ID NO: 34459 - DNA, 19 bp, synthetic construct
  source 1..19: mol_type = other DNA
tgtctacagggggctttgt

SEQ ID NO: 34460 - DNA, 19 bp, synthetic construct
  source 1..19: mol_type = other DNA
ttgtctacagggggctttg

SEQ ID NO: 34461 - DNA, 19 bp, synthetic construct
  source 1..19: mol_type = other DNA
tttgtctacagggggcttt

SEQ ID NO: 34462 - DNA, 19 bp, synthetic construct
  source 1..19: mol_type = other DNA
ctttgtctacagggggctt

SEQ ID NO: 34463 - DNA, 19 bp, synthetic construct
  source 1..19: mol_type = other DNA
gggctttgtctacaggggg

SEQ ID NO: 34464 - DNA, 19 bp, synthetic construct
  source 1..19: mol_type = other DNA
tgggctttgtctacagggg

SEQ ID NO: 34465 - DNA, 19 bp, synthetic construct
  source 1..19: mol_type = other DNA
ctgggctttgtctacaggg

SEQ ID NO: 34466 - DNA, 19 bp, synthetic construct
  source 1..19: mol_type = other DNA
tctgggctttgtctacagg

SEQ ID NO: 34467 - DNA, 19 bp, synthetic construct
  source 1..19: mol_type = other DNA
gtctgggctttgtctacag

SEQ ID NO: 34468 - DNA, 19 bp, synthetic construct
  source 1..19: mol_type = other DNA
tgtctgggctttgtctaca

SEQ ID NO: 34469 - DNA, 19 bp, synthetic construct
  source 1..19: mol_type = other DNA
ttgtctgggctttgtctac

SEQ ID NO: 34470 - DNA, 19 bp, synthetic construct
  source 1..19: mol_type = other DNA
attgtctgggctttgtcta

SEQ ID NO: 34471 - DNA, 19 bp, synthetic construct
  source 1..19: mol_type = other DNA
aattgtctgggctttgtct

SEQ ID NO: 34472 - DNA, 19 bp, synthetic construct
  source 1..19: mol_type = other DNA
aaattgtctgggctttgtc

SEQ ID NO: 34473 - DNA, 19 bp, synthetic construct
  source 1..19: mol_type = other DNA
aaaattgtctgggctttgt

SEQ ID NO: 34474 - DNA, 19 bp, synthetic construct
  source 1..19: mol_type = other DNA
gtaaaaattgtctgggctt

SEQ ID NO: 34475 - DNA, 19 bp, synthetic construct
  source 1..19: mol_type = other DNA
tgtaaaaattgtctgggct

SEQ ID NO: 34476 - DNA, 19 bp, synthetic construct
  source 1..19: mol_type = other DNA
ctcactcaggagatgtaaa

SEQ ID NO: 34477 - DNA, 19 bp, synthetic construct
  source 1..19: mol_type = other DNA
gctcactcaggagatgtaa

SEQ ID NO: 34478 - DNA, 19 bp, synthetic construct
  source 1..19: mol_type = other DNA
tgctcactcaggagatgta

SEQ ID NO: 34479 - DNA, 19 bp, synthetic construct
  source 1..19: mol_type = other DNA
atgctcactcaggagatgt

SEQ ID NO: 34480 - DNA, 19 bp, synthetic construct
  source 1..19: mol_type = other DNA
aatgctcactcaggagatg

SEQ ID NO: 34481 - DNA, 19 bp, synthetic construct
  source 1..19: mol_type = other DNA
caatgctcactcaggagat

SEQ ID NO: 34482 - DNA, 19 bp, synthetic construct
  source 1..19: mol_type = other DNA
ccaatgctcactcaggaga

SEQ ID NO: 34483 - DNA, 19 bp, synthetic construct
  source 1..19: mol_type = other DNA
tccaatgctcactcaggag

SEQ ID NO: 34484 - DNA, 19 bp, synthetic construct
  source 1..19: mol_type = other DNA
ctccaatgctcactcagga

SEQ ID NO: 34485 - DNA, 19 bp, synthetic construct
  source 1..19: mol_type = other DNA
tctccaatgctcactcagg

SEQ ID NO: 34486 - DNA, 19 bp, synthetic construct
  source 1..19: mol_type = other DNA
ctctccaatgctcactcag

SEQ ID NO: 34487 - DNA, 19 bp, synthetic construct
  source 1..19: mol_type = other DNA
tctctccaatgctcactca

SEQ ID NO: 34488 - DNA, 19 bp, synthetic construct
  source 1..19: mol_type = other DNA
atctctccaatgctcactc

SEQ ID NO: 34489 - DNA, 19 bp, synthetic construct
  source 1..19: mol_type = other DNA
gatctctccaatgctcact

SEQ ID NO: 34490 - DNA, 19 bp, synthetic construct
  source 1..19: mol_type = other DNA
agatctctccaatgctcac

SEQ ID NO: 34491 - DNA, 19 bp, synthetic construct
  source 1..19: mol_type = other DNA
cagatctctccaatgctca

SEQ ID NO: 34492 - DNA, 19 bp, synthetic construct
  source 1..19: mol_type = other DNA
acagatctctccaatgctc

SEQ ID NO: 34493 - DNA, 19 bp, synthetic construct
  source 1..19: mol_type = other DNA
gacagatctctccaatgct

SEQ ID NO: 34494 - DNA, 19 bp, synthetic construct
  source 1..19: mol_type = other DNA
tgacagatctctccaatgc

SEQ ID NO: 34495 - DNA, 19 bp, synthetic construct
  source 1..19: mol_type = other DNA
gtgacagatctctccaatg

SEQ ID NO: 34496 - DNA, 19 bp, synthetic construct
  source 1..19: mol_type = other DNA
tgtgacagatctctccaat

SEQ ID NO: 34497 - DNA, 19 bp, synthetic construct
  source 1..19: mol_type = other DNA
ttgtgacagatctctccaa

SEQ ID NO: 34498 - DNA, 19 bp, synthetic construct
  source 1..19: mol_type = other DNA
attgtgacagatctctcca

SEQ ID NO: 34499 - DNA, 19 bp, synthetic construct
  source 1..19: mol_type = other DNA
cattgtgacagatctctcc

SEQ ID NO: 34500 - DNA, 19 bp, synthetic construct
  source 1..19: mol_type = other DNA
gcattgtgacagatctctc

SEQ ID NO: 34501 - DNA, 19 bp, synthetic construct
  source 1..19: mol_type = other DNA
ggcattgtgacagatctct

SEQ ID NO: 34502 - DNA, 19 bp, synthetic construct
  source 1..19: mol_type = other DNA
gggcattgtgacagatctc

SEQ ID NO: 34503 - DNA, 19 bp, synthetic construct
  source 1..19: mol_type = other DNA
ggggcattgtgacagatct

SEQ ID NO: 34504 - DNA, 19 bp, synthetic construct
  source 1..19: mol_type = other DNA
aggggcattgtgacagatc

SEQ ID NO: 34505 - DNA, 19 bp, synthetic construct
  source 1..19: mol_type = other DNA
caggggcattgtgacagat

SEQ ID NO: 34506 - DNA, 19 bp, synthetic construct
  source 1..19: mol_type = other DNA
acaggggcattgtgacaga

SEQ ID NO: 34507 - DNA, 19 bp, synthetic construct
  source 1..19: mol_type = other DNA
tacaggggcattgtgacag

SEQ ID NO: 34508 - DNA, 19 bp, synthetic construct
  source 1..19: mol_type = other DNA
ctacaggggcattgtgaca

SEQ ID NO: 34509 - DNA, 19 bp, synthetic construct
  source 1..19: mol_type = other DNA
cctacaggggcattgtgac

SEQ ID NO: 34510 - DNA, 19 bp, synthetic construct
  source 1..19: mol_type = other DNA
gcctacaggggcattgtga

SEQ ID NO: 34511 - DNA, 19 bp, synthetic construct
  source 1..19: mol_type = other DNA
tgcctacaggggcattgtg

SEQ ID NO: 34512 - DNA, 19 bp, synthetic construct
  source 1..19: mol_type = other DNA
ctgcctacaggggcattgt

SEQ ID NO: 34513 - DNA, 19 bp, synthetic construct
  source 1..19: mol_type = other DNA
tctgcctacaggggcattg

SEQ ID NO: 34514 - DNA, 19 bp, synthetic construct
  source 1..19: mol_type = other DNA
ctctgcctacaggggcatt

SEQ ID NO: 34515 - DNA, 19 bp, synthetic construct
  source 1..19: mol_type = other DNA
taagctctgcctacagggg

SEQ ID NO: 34516 - DNA, 19 bp, synthetic construct
  source 1..19: mol_type = other DNA
ctaagctctgcctacaggg

SEQ ID NO: 34517 - DNA, 19 bp, synthetic construct
  source 1..19: mol_type = other DNA
tctaagctctgcctacagg

SEQ ID NO: 34518 - DNA, 19 bp, synthetic construct
  source 1..19: mol_type = other DNA
gtctaagctctgcctacag

SEQ ID NO: 34519 - DNA, 19 bp, synthetic construct
  source 1..19: mol_type = other DNA
tgtctaagctctgcctaca

SEQ ID NO: 34520 - DNA, 19 bp, synthetic construct
  source 1..19: mol_type = other DNA
ttgtctaagctctgcctac

SEQ ID NO: 34521 - DNA, 19 bp, synthetic construct
  source 1..19: mol_type = other DNA
cttgtctaagctctgccta

SEQ ID NO: 34522 - DNA, 19 bp, synthetic construct
  source 1..19: mol_type = other DNA
acttgtctaagctctgcct

SEQ ID NO: 34523 - DNA, 19 bp, synthetic construct
  source 1..19: mol_type = other DNA
cacttgtctaagctctgcc

SEQ ID NO: 34524 - DNA, 19 bp, synthetic construct
  source 1..19: mol_type = other DNA
acacttgtctaagctctgc

SEQ ID NO: 34525 - DNA, 19 bp, synthetic construct
  source 1..19: mol_type = other DNA
aacacttgtctaagctctg

SEQ ID NO: 34526 - DNA, 19 bp, synthetic construct
  source 1..19: mol_type = other DNA
taacacttgtctaagctct

SEQ ID NO: 34527 - DNA, 19 bp, synthetic construct
  source 1..19: mol_type = other DNA
gtaacacttgtctaagctc

SEQ ID NO: 34528 - DNA, 19 bp, synthetic construct
  source 1..19: mol_type = other DNA
tgtaacacttgtctaagct

SEQ ID NO: 34529 - DNA, 19 bp, synthetic construct
  source 1..19: mol_type = other DNA
atgtaacacttgtctaagc

SEQ ID NO: 34530 - DNA, 19 bp, synthetic construct
  source 1..19: mol_type = other DNA
gtgatgtaacacttgtcta

SEQ ID NO: 34531 - DNA, 19 bp, synthetic construct
  source 1..19: mol_type = other DNA
ggtgatgtaacacttgtct

SEQ ID NO: 34532 - DNA, 19 bp, synthetic construct
  source 1..19: mol_type = other DNA
aggtgatgtaacacttgtc

SEQ ID NO: 34533 - DNA, 19 bp, synthetic construct
  source 1..19: mol_type = other DNA
caggtgatgtaacacttgt

SEQ ID NO: 34534 - DNA, 19 bp, synthetic construct
  source 1..19: mol_type = other DNA
ccaggtgatgtaacacttg

SEQ ID NO: 34535 - DNA, 19 bp, synthetic construct
  source 1..19: mol_type = other DNA
cccaggtgatgtaacactt

SEQ ID NO: 34536 - DNA, 19 bp, synthetic construct
  source 1..19: mol_type = other DNA
acccaggtgatgtaacact

SEQ ID NO: 34537 - DNA, 19 bp, synthetic construct
  source 1..19: mol_type = other DNA
cacccaggtgatgtaacac

SEQ ID NO: 34538 - DNA, 19 bp, synthetic construct
  source 1..19: mol_type = other DNA
tcacccaggtgatgtaaca

SEQ ID NO: 34539 - DNA, 19 bp, synthetic construct
  source 1..19: mol_type = other DNA
atcacccaggtgatgtaac

SEQ ID NO: 34540 - DNA, 19 bp, synthetic construct
  source 1..19: mol_type = other DNA
gatcacccaggtgatgtaa

SEQ ID NO: 34541 - DNA, 19 bp, synthetic construct
  source 1..19: mol_type = other DNA
tgatcacccaggtgatgta

SEQ ID NO: 34542 - DNA, 19 bp, synthetic construct
  source 1..19: mol_type = other DNA
ctgatcacccaggtgatgt

SEQ ID NO: 34543 - DNA, 19 bp, synthetic construct
  source 1..19: mol_type = other DNA
actgatcacccaggtgatg

SEQ ID NO: 34544 - DNA, 19 bp, synthetic construct
  source 1..19: mol_type = other DNA
cactgatcacccaggtgat

SEQ ID NO: 34545 - DNA, 19 bp, synthetic construct
  source 1..19: mol_type = other DNA
gcactgatcacccaggtga

SEQ ID NO: 34546 - DNA, 19 bp, synthetic construct
  source 1..19: mol_type = other DNA
tgcactgatcacccaggtg

SEQ ID NO: 34547 - DNA, 19 bp, synthetic construct
  source 1..19: mol_type = other DNA
ctgcactgatcacccaggt

SEQ ID NO: 34548 - DNA, 19 bp, synthetic construct
  source 1..19: mol_type = other DNA
tctgcactgatcacccagg

SEQ ID NO: 34549 - DNA, 19 bp, synthetic construct
  source 1..19: mol_type = other DNA
ctctgcactgatcacccag

SEQ ID NO: 34550 - DNA, 19 bp, synthetic construct
  source 1..19: mol_type = other DNA
tctctgcactgatcaccca

SEQ ID NO: 34551 - DNA, 19 bp, synthetic construct
  source 1..19: mol_type = other DNA
atctctgcactgatcaccc

SEQ ID NO: 34552 - DNA, 19 bp, synthetic construct
  source 1..19: mol_type = other DNA
catctctgcactgatcacc

SEQ ID NO: 34553 - DNA, 19 bp, synthetic construct
  source 1..19: mol_type = other DNA
acatctctgcactgatcac

SEQ ID NO: 34554 - DNA, 19 bp, synthetic construct
  source 1..19: mol_type = other DNA
cacatctctgcactgatca

SEQ ID NO: 34555 - DNA, 19 bp, synthetic construct
  source 1..19: mol_type = other DNA
acacatctctgcactgatc

SEQ ID NO: 34556 - DNA, 19 bp, synthetic construct
  source 1..19: mol_type = other DNA
gacacatctctgcactgat

SEQ ID NO: 34557 - DNA, 19 bp, synthetic construct
  source 1..19: mol_type = other DNA
tgacacatctctgcactga

SEQ ID NO: 34558 - DNA, 19 bp, synthetic construct
  source 1..19: mol_type = other DNA
ctacaggagcgttttgaca

SEQ ID NO: 34559 - DNA, 19 bp, synthetic construct
  source 1..19: mol_type = other DNA
actacaggagcgttttgac

SEQ ID NO: 34560 - DNA, 19 bp, synthetic construct
  source 1..19: mol_type = other DNA
gactacaggagcgttttga

SEQ ID NO: 34561 - DNA, 19 bp, synthetic construct
  source 1..19: mol_type = other DNA
agactacaggagcgttttg

SEQ ID NO: 34562 - DNA, 19 bp, synthetic construct
  source 1..19: mol_type = other DNA
cagactacaggagcgtttt

SEQ ID NO: 34563 - DNA, 19 bp, synthetic construct
  source 1..19: mol_type = other DNA
tcagactacaggagcgttt

SEQ ID NO: 34564 - DNA, 19 bp, synthetic construct
  source 1..19: mol_type = other DNA
ttcagactacaggagcgtt

SEQ ID NO: 34565 - DNA, 19 bp, synthetic construct
  source 1..19: mol_type = other DNA
gttcagactacaggagcgt

SEQ ID NO: 34566 - DNA, 19 bp, synthetic construct
  source 1..19: mol_type = other DNA
ggttcagactacaggagcg

SEQ ID NO: 34567 - DNA, 19 bp, synthetic construct
  source 1..19: mol_type = other DNA
aggttcagactacaggagc

SEQ ID NO: 34568 - DNA, 19 bp, synthetic construct
  source 1..19: mol_type = other DNA
taggttcagactacaggag

SEQ ID NO: 34569 - DNA, 19 bp, synthetic construct
  source 1..19: mol_type = other DNA
ctaggttcagactacagga

SEQ ID NO: 34570 - DNA, 19 bp, synthetic construct
  source 1..19: mol_type = other DNA
tctaggttcagactacagg

SEQ ID NO: 34571 - DNA, 19 bp, synthetic construct
  source 1..19: mol_type = other DNA
gtctaggttcagactacag

SEQ ID NO: 34572 - DNA, 19 bp, synthetic construct
  source 1..19: mol_type = other DNA
tgtctaggttcagactaca

SEQ ID NO: 34573 - DNA, 19 bp, synthetic construct
  source 1..19: mol_type = other DNA
ctgtctaggttcagactac

SEQ ID NO: 34574 - DNA, 19 bp, synthetic construct
  source 1..19: mol_type = other DNA
cctgtctaggttcagacta

SEQ ID NO: 34575 - DNA, 19 bp, synthetic construct
  source 1..19: mol_type = other DNA
tcctgtctaggttcagact

SEQ ID NO: 34576 - DNA, 19 bp, synthetic construct
  source 1..19: mol_type = other DNA
ctcctgtctaggttcagac

SEQ ID NO: 34577 - DNA, 19 bp, synthetic construct
  source 1..19: mol_type = other DNA
actcctgtctaggttcaga

SEQ ID NO: 34578 - DNA, 19 bp, synthetic construct
  source 1..19: mol_type = other DNA
aactcctgtctaggttcag

SEQ ID NO: 34579 - DNA, 19 bp, synthetic construct
  source 1..19: mol_type = other DNA
taactcctgtctaggttca

SEQ ID NO: 34580 - DNA, 19 bp, synthetic construct
  source 1..19: mol_type = other DNA
gtaactcctgtctaggttc

SEQ ID NO: 34581 - DNA, 19 bp, synthetic construct
  source 1..19: mol_type = other DNA
tgtaactcctgtctaggtt

SEQ ID NO: 34582 - DNA, 19 bp, synthetic construct
  source 1..19: mol_type = other DNA
atgtaactcctgtctaggt

SEQ ID NO: 34583 - DNA, 19 bp, synthetic construct
  source 1..19: mol_type = other DNA
gatgtaactcctgtctagg

SEQ ID NO: 34584 - DNA, 19 bp, synthetic construct
  source 1..19: mol_type = other DNA
tgatgtaactcctgtctag

SEQ ID NO: 34585 - DNA, 19 bp, synthetic construct
  source 1..19: mol_type = other DNA
gtgatgtaactcctgtcta

SEQ ID NO: 34586 - DNA, 19 bp, synthetic construct
  source 1..19: mol_type = other DNA
ggtgatgtaactcctgtct

SEQ ID NO: 34587 - DNA, 19 bp, synthetic construct
  source 1..19: mol_type = other DNA
aggtgatgtaactcctgtc

SEQ ID NO: 34588 - DNA, 19 bp, synthetic construct
  source 1..19: mol_type = other DNA
aaggtgatgtaactcctgt

SEQ ID NO: 34589 - DNA, 19 bp, synthetic construct
  source 1..19: mol_type = other DNA
caaggtgatgtaactcctg

SEQ ID NO: 34590 - DNA, 19 bp, synthetic construct
  source 1..19: mol_type = other DNA
ccaaggtgatgtaactcct

SEQ ID NO: 34591 - DNA, 19 bp, synthetic construct
  source 1..19: mol_type = other DNA
cccaaggtgatgtaactcc

SEQ ID NO: 34592 - DNA, 19 bp, synthetic construct
  source 1..19: mol_type = other DNA
ccccaaggtgatgtaactc

SEQ ID NO: 34593 - DNA, 19 bp, synthetic construct
  source 1..19: mol_type = other DNA
tccccaaggtgatgtaact

SEQ ID NO: 34594 - DNA, 19 bp, synthetic construct
  source 1..19: mol_type = other DNA
atccccaaggtgatgtaac

SEQ ID NO: 34595 - DNA, 19 bp, synthetic construct
  source 1..19: mol_type = other DNA
gatccccaaggtgatgtaa

SEQ ID NO: 34596 - DNA, 19 bp, synthetic construct
  source 1..19: mol_type = other DNA
tgatccccaaggtgatgta

SEQ ID NO: 34597 - DNA, 19 bp, synthetic construct
  source 1..19: mol_type = other DNA
ctgatccccaaggtgatgt

SEQ ID NO: 34598 - DNA, 19 bp, synthetic construct
  source 1..19: mol_type = other DNA
actgatccccaaggtgatg

SEQ ID NO: 34599 - DNA, 19 bp, synthetic construct
  source 1..19: mol_type = other DNA
cactgatccccaaggtgat

SEQ ID NO: 34600 - DNA, 19 bp, synthetic construct
  source 1..19: mol_type = other DNA
gcactgatccccaaggtga

SEQ ID NO: 34601 - DNA, 19 bp, synthetic construct
  source 1..19: mol_type = other DNA
tgcactgatccccaaggtg

SEQ ID NO: 34602 - DNA, 19 bp, synthetic construct
  source 1..19: mol_type = other DNA
ctgcactgatccccaaggt

SEQ ID NO: 34603 - DNA, 19 bp, synthetic construct
  source 1..19: mol_type = other DNA
tctgcactgatccccaagg

SEQ ID NO: 34604 - DNA, 19 bp, synthetic construct
  source 1..19: mol_type = other DNA
ctctgcactgatccccaag

SEQ ID NO: 34605 - DNA, 19 bp, synthetic construct
  source 1..19: mol_type = other DNA
tctctgcactgatccccaa

SEQ ID NO: 34606 - DNA, 19 bp, synthetic construct
  source 1..19: mol_type = other DNA
atctctgcactgatcccca

SEQ ID NO: 34607 - DNA, 19 bp, synthetic construct
  source 1..19: mol_type = other DNA
tatctctgcactgatcccc

SEQ ID NO: 34608 - DNA, 19 bp, synthetic construct
  source 1..19: mol_type = other DNA
gtatctctgcactgatccc

SEQ ID NO: 34609 - DNA, 19 bp, synthetic construct
  source 1..19: mol_type = other DNA
cgtatctctgcactgatcc

SEQ ID NO: 34610 - DNA, 19 bp, synthetic construct
  source 1..19: mol_type = other DNA
acgtatctctgcactgatc

SEQ ID NO: 34611 - DNA, 19 bp, synthetic construct
  source 1..19: mol_type = other DNA
cacgtatctctgcactgat

SEQ ID NO: 34612 - DNA, 19 bp, synthetic construct
  source 1..19: mol_type = other DNA
tcacgtatctctgcactga

SEQ ID NO: 34613 - DNA, 19 bp, synthetic construct
  source 1..19: mol_type = other DNA
ctcacgtatctctgcactg

SEQ ID NO: 34614 - DNA, 19 bp, synthetic construct
  source 1..19: mol_type = other DNA
tctcacgtatctctgcact

SEQ ID NO: 34615 - DNA, 19 bp, synthetic construct
  source 1..19: mol_type = other DNA
ttctcacgtatctctgcac

SEQ ID NO: 34616 - DNA, 19 bp, synthetic construct
  source 1..19: mol_type = other DNA
attctcacgtatctctgca

SEQ ID NO: 34617 - DNA, 19 bp, synthetic construct
  source 1..19: mol_type = other DNA
aattctcacgtatctctgc

SEQ ID NO: 34618 - DNA, 19 bp, synthetic construct
  source 1..19: mol_type = other DNA
gaattctcacgtatctctg

SEQ ID NO: 34619 - DNA, 19 bp, synthetic construct
  source 1..19: mol_type = other DNA
ggaattctcacgtatctct

SEQ ID NO: 34620 - DNA, 19 bp, synthetic construct
  source 1..19: mol_type = other DNA
gggaattctcacgtatctc

SEQ ID NO: 34621 - DNA, 19 bp, synthetic construct
  source 1..19: mol_type = other DNA
agggaattctcacgtatct

SEQ ID NO: 34622 - DNA, 19 bp, synthetic construct
  source 1..19: mol_type = other DNA
aagggaattctcacgtatc

SEQ ID NO: 34623 - DNA, 19 bp, synthetic construct
  source 1..19: mol_type = other DNA
caagggaattctcacgtat

SEQ ID NO: 34624 - DNA, 19 bp, synthetic construct
  source 1..19: mol_type = other DNA
acaagggaattctcacgta

SEQ ID NO: 34625 - DNA, 19 bp, synthetic construct
  source 1..19: mol_type = other DNA
tacaagggaattctcacgt

SEQ ID NO: 34626 - DNA, 19 bp, synthetic construct
  source 1..19: mol_type = other DNA
ctacaagggaattctcacg

SEQ ID NO: 34627 - DNA, 19 bp, synthetic construct
  source 1..19: mol_type = other DNA
cctacaagggaattctcac

SEQ ID NO: 34628 - DNA, 19 bp, synthetic construct
  source 1..19: mol_type = other DNA
gcctacaagggaattctca

SEQ ID NO: 34629 - DNA, 19 bp, synthetic construct
  source 1..19: mol_type = other DNA
tgcctacaagggaattctc

SEQ ID NO: 34630 - DNA, 19 bp, synthetic construct
  source 1..19: mol_type = other DNA
ctgcctacaagggaattct

SEQ ID NO: 34631 - DNA, 19 bp, synthetic construct
  source 1..19: mol_type = other DNA
cctgcctacaagggaattc

SEQ ID NO: 34632 - DNA, 19 bp, synthetic construct
  source 1..19: mol_type = other DNA
ccctgcctacaagggaatt

SEQ ID NO: 34633 - DNA, 19 bp, synthetic construct
  source 1..19: mol_type = other DNA
gccctgcctacaagggaat

SEQ ID NO: 34634 - DNA, 19 bp, synthetic construct
  source 1..19: mol_type = other DNA
ggccctgcctacaagggaa

SEQ ID NO: 34635 - DNA, 19 bp, synthetic construct
  source 1..19: mol_type = other DNA
taggccctgcctacaaggg

SEQ ID NO: 34636 - DNA, 19 bp, synthetic construct
  source 1..19: mol_type = other DNA
ctaggccctgcctacaagg

SEQ ID NO: 34637 - DNA, 19 bp, synthetic construct
  source 1..19: mol_type = other DNA
tctaggccctgcctacaag

SEQ ID NO: 34638 - DNA, 19 bp, synthetic construct
  source 1..19: mol_type = other DNA
aacacttgtctaggccctg

SEQ ID NO: 34639 - DNA, 19 bp, synthetic construct
  source 1..19: mol_type = other DNA
taacacttgtctaggccct

SEQ ID NO: 34640 - DNA, 19 bp, synthetic construct
  source 1..19: mol_type = other DNA
gtaacacttgtctaggccc

SEQ ID NO: 34641 - DNA, 19 bp, synthetic construct
  source 1..19: mol_type = other DNA
tgtaacacttgtctaggcc

SEQ ID NO: 34642 - DNA, 19 bp, synthetic construct
  source 1..19: mol_type = other DNA
atgtaacacttgtctaggc

SEQ ID NO: 34643 - DNA, 19 bp, synthetic construct
  source 1..19: mol_type = other DNA
gatgtaacacttgtctagg

SEQ ID NO: 34644 - DNA, 19 bp, synthetic construct
  source 1..19: mol_type = other DNA
tgatgtaacacttgtctag

SEQ ID NO: 34645 - DNA, 19 bp, synthetic construct
  source 1..19: mol_type = other DNA
taggtgatgtaacacttgt

SEQ ID NO: 34646 - DNA, 19 bp, synthetic construct
  source 1..19: mol_type = other DNA
ctaggtgatgtaacacttg

SEQ ID NO: 34647 - DNA, 19 bp, synthetic construct
  source 1..19: mol_type = other DNA
cctaggtgatgtaacactt

SEQ ID NO: 34648 - DNA, 19 bp, synthetic construct
  source 1..19: mol_type = other DNA
acctaggtgatgtaacact

SEQ ID NO: 34649 - DNA, 19 bp, synthetic construct
  source 1..19: mol_type = other DNA
aacctaggtgatgtaacac

SEQ ID NO: 34650 - DNA, 19 bp, synthetic construct
  source 1..19: mol_type = other DNA
taacctaggtgatgtaaca

SEQ ID NO: 34651 - DNA, 19 bp, synthetic construct
  source 1..19: mol_type = other DNA
gataacctaggtgatgtaa

SEQ ID NO: 34652 - DNA, 19 bp, synthetic construct
  source 1..19: mol_type = other DNA
tgataacctaggtgatgta

SEQ ID NO: 34653 - DNA, 19 bp, synthetic construct
  source 1..19: mol_type = other DNA
ctgataacctaggtgatgt

SEQ ID NO: 34654 - DNA, 19 bp, synthetic construct
  source 1..19: mol_type = other DNA
actgataacctaggtgatg

SEQ ID NO: 34655 - DNA, 19 bp, synthetic construct
  source 1..19: mol_type = other DNA
cactgataacctaggtgat

SEQ ID NO: 34656 - DNA, 19 bp, synthetic construct
  source 1..19: mol_type = other DNA
gcactgataacctaggtga

SEQ ID NO: 34657 - DNA, 19 bp, synthetic construct
  source 1..19: mol_type = other DNA
tgcactgataacctaggtg

SEQ ID NO: 34658 - DNA, 19 bp, synthetic construct
  source 1..19: mol_type = other DNA
ctgcactgataacctaggt

SEQ ID NO: 34659 - DNA, 19 bp, synthetic construct
  source 1..19: mol_type = other DNA
tctgcactgataacctagg

SEQ ID NO: 34660 - DNA, 19 bp, synthetic construct
  source 1..19: mol_type = other DNA
ctctgcactgataacctag

SEQ ID NO: 34661 - DNA, 19 bp, synthetic construct
  source 1..19: mol_type = other DNA
tctctgcactgataaccta

SEQ ID NO: 34662 - DNA, 19 bp, synthetic construct
  source 1..19: mol_type = other DNA
atctctgcactgataacct

SEQ ID NO: 34663 - DNA, 19 bp, synthetic construct
  source 1..19: mol_type = other DNA
tatctctgcactgataacc

SEQ ID NO: 34664 - DNA, 19 bp, synthetic construct
  source 1..19: mol_type = other DNA
atatctctgcactgataac

SEQ ID NO: 34665 - DNA, 19 bp, synthetic construct
  source 1..19: mol_type = other DNA
catatctctgcactgataa

SEQ ID NO: 34666 - DNA, 19 bp, synthetic construct
  source 1..19: mol_type = other DNA
acatatctctgcactgata

SEQ ID NO: 34667 - DNA, 19 bp, synthetic construct
  source 1..19: mol_type = other DNA
cacatatctctgcactgat

SEQ ID NO: 34668 - DNA, 19 bp, synthetic construct
  source 1..19: mol_type = other DNA
tcacatatctctgcactga

SEQ ID NO: 34669 - DNA, 19 bp, synthetic construct
  source 1..19: mol_type = other DNA
ctcacatatctctgcactg

SEQ ID NO: 34670 - DNA, 19 bp, synthetic construct
  source 1..19: mol_type = other DNA
tctcacatatctctgcact

SEQ ID NO: 34671 - DNA, 19 bp, synthetic construct
  source 1..19: mol_type = other DNA
ttctcacatatctctgcac

SEQ ID NO: 34672 - DNA, 19 bp, synthetic construct
  source 1..19: mol_type = other DNA
attctcacatatctctgca

SEQ ID NO: 34673 - DNA, 19 bp, synthetic construct
  source 1..19: mol_type = other DNA
aattctcacatatctctgc

SEQ ID NO: 34674 - DNA, 19 bp, synthetic construct
  source 1..19: mol_type = other DNA
gaattctcacatatctctg

SEQ ID NO: 34675 - DNA, 19 bp, synthetic construct
  source 1..19: mol_type = other DNA
ggaattctcacatatctct

SEQ ID NO: 34676 - DNA, 19 bp, synthetic construct
  source 1..19: mol_type = other DNA
gggaattctcacatatctc

SEQ ID NO: 34677 - DNA, 19 bp, synthetic construct
  source 1..19: mol_type = other DNA
cgggaattctcacatatct

SEQ ID NO: 34678 - DNA, 19 bp, synthetic construct
  source 1..19: mol_type = other DNA
acgggaattctcacatatc

SEQ ID NO: 34679 - DNA, 19 bp, synthetic construct
  source 1..19: mol_type = other DNA
cacgggaattctcacatat

SEQ ID NO: 34680 - DNA, 19 bp, synthetic construct
  source 1..19: mol_type = other DNA
acacgggaattctcacata

SEQ ID NO: 34681 - DNA, 19 bp, synthetic construct
  source 1..19: mol_type = other DNA
tacacgggaattctcacat

SEQ ID NO: 34682 - DNA, 19 bp, synthetic construct
  source 1..19: mol_type = other DNA
ctacacgggaattctcaca

SEQ ID NO: 34683 - DNA, 19 bp, synthetic construct
  source 1..19: mol_type = other DNA
cctacacgggaattctcac

SEQ ID NO: 34684 - DNA, 19 bp, synthetic construct
  source 1..19: mol_type = other DNA
gcctacacgggaattctca

SEQ ID NO: 34685 - DNA, 19 bp, synthetic construct
  source 1..19: mol_type = other DNA
tgcctacacgggaattctc

SEQ ID NO: 34686 - DNA, 19 bp, synthetic construct
  source 1..19: mol_type = other DNA
ctgcctacacgggaattct

SEQ ID NO: 34687 - DNA, 19 bp, synthetic construct
  source 1..19: mol_type = other DNA
tctgcctacacgggaattc

SEQ ID NO: 34688 - DNA, 19 bp, synthetic construct
  source 1..19: mol_type = other DNA
ctctgcctacacgggaatt

SEQ ID NO: 34689 - DNA, 19 bp, synthetic construct
  source 1..19: mol_type = other DNA
gctctgcctacacgggaat

SEQ ID NO: 34690 - DNA, 19 bp, synthetic construct
  source 1..19: mol_type = other DNA
ggctctgcctacacgggaa

SEQ ID NO: 34691 - DNA, 19 bp, synthetic construct
  source 1..19: mol_type = other DNA
aggctctgcctacacggga

SEQ ID NO: 34692 - DNA, 19 bp, synthetic construct
  source 1..19: mol_type = other DNA
taggctctgcctacacggg

SEQ ID NO: 34693 - DNA, 19 bp, synthetic construct
  source 1..19: mol_type = other DNA
ctaggctctgcctacacgg

SEQ ID NO: 34694 - DNA, 19 bp, synthetic construct
  source 1..19: mol_type = other DNA
tctaggctctgcctacacg

SEQ ID NO: 34695 - DNA, 19 bp, synthetic construct
  source 1..19: mol_type = other DNA
gtctaggctctgcctacac

SEQ ID NO: 34696 - DNA, 19 bp, synthetic construct
  source 1..19: mol_type = other DNA
tgtctaggctctgcctaca

SEQ ID NO: 34697 - DNA, 19 bp, synthetic construct
  source 1..19: mol_type = other DNA
ttgtctaggctctgcctac

SEQ ID NO: 34698 - DNA, 19 bp, synthetic construct
  source 1..19: mol_type = other DNA
cttgtctaggctctgccta

SEQ ID NO: 34699 - DNA, 19 bp, synthetic construct
  source 1..19: mol_type = other DNA
cacttgtctaggctctgcc

SEQ ID NO: 34700 - DNA, 19 bp, synthetic construct
  source 1..19: mol_type = other DNA
acacttgtctaggctctgc

SEQ ID NO: 34701 - DNA, 19 bp, synthetic construct
  source 1..19: mol_type = other DNA
aacacttgtctaggctctg

SEQ ID NO: 34702 - DNA, 19 bp, synthetic construct
  source 1..19: mol_type = other DNA
taacacttgtctaggctct

SEQ ID NO: 34703 - DNA, 19 bp, synthetic construct
  source 1..19: mol_type = other DNA
gtaacacttgtctaggctc

SEQ ID NO: 34704 - DNA, 19 bp, synthetic construct
  source 1..19: mol_type = other DNA
tgtaacacttgtctaggct

SEQ ID NO: 34705 - DNA, 19 bp, synthetic construct
  source 1..19: mol_type = other DNA
actaggtgatgtaacactt

SEQ ID NO: 34706 - DNA, 19 bp, synthetic construct
  source 1..19: mol_type = other DNA
ggaggctttatgactaata

SEQ ID NO: 34707 - DNA, 19 bp, synthetic construct
  source 1..19: mol_type = other DNA
aggaggctttatgactaat

SEQ ID NO: 34708 - DNA, 19 bp, synthetic construct
  source 1..19: mol_type = other DNA
caggaggctttatgactaa

SEQ ID NO: 34709 - DNA, 19 bp, synthetic construct
  source 1..19: mol_type = other DNA
acaggaggctttatgacta

SEQ ID NO: 34710 - DNA, 19 bp, synthetic construct
  source 1..19: mol_type = other DNA
gagggaactcttgtctacg

SEQ ID NO: 34711 - DNA, 19 bp, synthetic construct
  source 1..19: mol_type = other DNA
ggagggaactcttgtctac

SEQ ID NO: 34712 - DNA, 19 bp, synthetic construct
  source 1..19: mol_type = other DNA
aggagggaactcttgtcta

SEQ ID NO: 34713 - DNA, 19 bp, synthetic construct
  source 1..19: mol_type = other DNA
gaggagggaactcttgtct

SEQ ID NO: 34714 - DNA, 19 bp, synthetic construct
  source 1..19: mol_type = other DNA
tgaggagggaactcttgtc

SEQ ID NO: 34715 - DNA, 19 bp, synthetic construct
  source 1..19: mol_type = other DNA
ctgaggagggaactcttgt

SEQ ID NO: 34716 - DNA, 19 bp, synthetic construct
  source 1..19: mol_type = other DNA
cctgaggagggaactcttg

SEQ ID NO: 34717 - DNA, 19 bp, synthetic construct
  source 1..19: mol_type = other DNA
ccctgaggagggaactctt

SEQ ID NO: 34718 - DNA, 19 bp, synthetic construct
  source 1..19: mol_type = other DNA
accctgaggagggaactct

SEQ ID NO: 34719 - DNA, 19 bp, synthetic construct
  source 1..19: mol_type = other DNA
caccctgaggagggaactc

SEQ ID NO: 34720 - DNA, 19 bp, synthetic construct
  source 1..19: mol_type = other DNA
tcaccctgaggagggaact

SEQ ID NO: 34721 - DNA, 19 bp, synthetic construct
  source 1..19: mol_type = other DNA
atcaccctgaggagggaac

SEQ ID NO: 34722 - DNA, 19 bp, synthetic construct
  source 1..19: mol_type = other DNA
gatcaccctgaggagggaa

SEQ ID NO: 34723 - DNA, 19 bp, synthetic construct
  source 1..19: mol_type = other DNA
tgatcaccctgaggaggga

SEQ ID NO: 34724 - DNA, 19 bp, synthetic construct
  source 1..19: mol_type = other DNA
ctgatcaccctgaggaggg

SEQ ID NO: 34725 - DNA, 19 bp, synthetic construct
  source 1..19: mol_type = other DNA
actgatcaccctgaggagg

SEQ ID NO: 34726 - DNA, 19 bp, synthetic construct
  source 1..19: mol_type = other DNA
cactgatcaccctgaggag

SEQ ID NO: 34727 - DNA, 19 bp, synthetic construct
  source 1..19: mol_type = other DNA
gcactgatcaccctgagga

SEQ ID NO: 34728 - DNA, 19 bp, synthetic construct
  source 1..19: mol_type = other DNA
tgcactgatcaccctgagg

SEQ ID NO: 34729 - DNA, 19 bp, synthetic construct
  source 1..19: mol_type = other DNA
ctgcactgatcaccctgag

SEQ ID NO: 34730 - DNA, 19 bp, synthetic construct
  source 1..19: mol_type = other DNA
tctgcactgatcaccctga

SEQ ID NO: 34731 - DNA, 19 bp, synthetic construct
  source 1..19: mol_type = other DNA
ctctgcactgatcaccctg

SEQ ID NO: 34732 - DNA, 19 bp, synthetic construct
  source 1..19: mol_type = other DNA
tctctgcactgatcaccct

SEQ ID NO: 34733 - DNA, 19 bp, synthetic construct
  source 1..19: mol_type = other DNA
gtgacacatctctgcactg

SEQ ID NO: 34734 - DNA, 19 bp, synthetic construct
  source 1..19: mol_type = other DNA
tgtgacacatctctgcact

SEQ ID NO: 34735 - DNA, 19 bp, synthetic construct
  source 1..19: mol_type = other DNA
ttgtgacacatctctgcac

SEQ ID NO: 34736 - DNA, 19 bp, synthetic construct
  source 1..19: mol_type = other DNA
tttgtgacacatctctgca

SEQ ID NO: 34737 - DNA, 19 bp, synthetic construct
  source 1..19: mol_type = other DNA
ctttgtgacacatctctgc

SEQ ID NO: 34738 - DNA, 19 bp, synthetic construct
  source 1..19: mol_type = other DNA
gctttgtgacacatctctg

SEQ ID NO: 34739 - DNA, 19 bp, synthetic construct
  source 1..19: mol_type = other DNA
ggctttgtgacacatctct

SEQ ID NO: 34740 - DNA, 19 bp, synthetic construct
  source 1..19: mol_type = other DNA
gggctttgtgacacatctc

SEQ ID NO: 34741 - DNA, 19 bp, synthetic construct
  source 1..19: mol_type = other DNA
ggggctttgtgacacatct

SEQ ID NO: 34742 - DNA, 19 bp, synthetic construct
  source 1..19: mol_type = other DNA
aggggctttgtgacacatc

SEQ ID NO: 34743 - DNA, 19 bp, synthetic construct
  source 1..19: mol_type = other DNA
caggggctttgtgacacat

SEQ ID NO: 34744 - DNA, 19 bp, synthetic construct
  source 1..19: mol_type = other DNA
acaggggctttgtgacaca

SEQ ID NO: 34745 - DNA, 19 bp, synthetic construct
  source 1..19: mol_type = other DNA
tacaggggctttgtgacac

SEQ ID NO: 34746 - DNA, 19 bp, synthetic construct
  source 1..19: mol_type = other DNA
ctacaggggctttgtgaca

SEQ ID NO: 34747 - DNA, 19 bp, synthetic construct
  source 1..19: mol_type = other DNA
cctacaggggctttgtgac

SEQ ID NO: 34748 - DNA, 19 bp, synthetic construct
  source 1..19: mol_type = other DNA
gcctacaggggctttgtga

SEQ ID NO: 34749 - DNA, 19 bp, synthetic construct
  source 1..19: mol_type = other DNA
tgcctacaggggctttgtg

SEQ ID NO: 34750 - DNA, 19 bp, synthetic construct
  source 1..19: mol_type = other DNA
tctgcctacaggggctttg

SEQ ID NO: 34751 - DNA, 19 bp, synthetic construct
  source 1..19: mol_type = other DNA
ctaggctctgcctacaggg

SEQ ID NO: 34752 - DNA, 19 bp, synthetic construct
  source 1..19: mol_type = other DNA
tctaggctctgcctacagg

SEQ ID NO: 34753 - DNA, 19 bp, synthetic construct
  source 1..19: mol_type = other DNA
gtctaggctctgcctacag

SEQ ID NO: 34754 - DNA, 19 bp, synthetic construct
  source 1..19: mol_type = other DNA
actcttgtctaggctctgc

SEQ ID NO: 34755 - DNA, 19 bp, synthetic construct
  source 1..19: mol_type = other DNA
aactcttgtctaggctctg

SEQ ID NO: 34756 - DNA, 19 bp, synthetic construct
  source 1..19: mol_type = other DNA
aaactcttgtctaggctct

SEQ ID NO: 34757 - DNA, 19 bp, synthetic construct
  source 1..19: mol_type = other DNA
gaaactcttgtctaggctc

SEQ ID NO: 34758 - DNA, 19 bp, synthetic construct
  source 1..19: mol_type = other DNA
tgaaactcttgtctaggct

SEQ ID NO: 34759 - DNA, 19 bp, synthetic construct
  source 1..19: mol_type = other DNA
atgaaactcttgtctaggc

SEQ ID NO: 34760 - DNA, 19 bp, synthetic construct
  source 1..19: mol_type = other DNA
gatgaaactcttgtctagg

SEQ ID NO: 34761 - DNA, 19 bp, synthetic construct
  source 1..19: mol_type = other DNA
gtgatgaaactcttgtcta

SEQ ID NO: 34762 - DNA, 19 bp, synthetic construct
  source 1..19: mol_type = other DNA
agtgatgaaactcttgtct

SEQ ID NO: 34763 - DNA, 19 bp, synthetic construct
  source 1..19: mol_type = other DNA
accaagtgatgaaactctt

SEQ ID NO: 34764 - DNA, 19 bp, synthetic construct
  source 1..19: mol_type = other DNA
ctgatcaaccaagtgatga

SEQ ID NO: 34765 - DNA, 19 bp, synthetic construct
  source 1..19: mol_type = other DNA
actgatcaaccaagtgatg

SEQ ID NO: 34766 - DNA, 19 bp, synthetic construct
  source 1..19: mol_type = other DNA
gaactgatcaaccaagtga

SEQ ID NO: 34767 - DNA, 19 bp, synthetic construct
  source 1..19: mol_type = other DNA
ctgaactgatcaaccaagt

SEQ ID NO: 34768 - DNA, 19 bp, synthetic construct
  source 1..19: mol_type = other DNA
ctctgaactgatcaaccaa

SEQ ID NO: 34769 - DNA, 19 bp, synthetic construct
  source 1..19: mol_type = other DNA
tctctgaactgatcaacca

SEQ ID NO: 34770 - DNA, 19 bp, synthetic construct
  source 1..19: mol_type = other DNA
atctctgaactgatcaacc

SEQ ID NO: 34771 - DNA, 19 bp, synthetic construct
  source 1..19: mol_type = other DNA
catctctgaactgatcaac

SEQ ID NO: 34772 - DNA, 19 bp, synthetic construct
  source 1..19: mol_type = other DNA
acatctctgaactgatcaa

SEQ ID NO: 34773 - DNA, 19 bp, synthetic construct
  source 1..19: mol_type = other DNA
cacatctctgaactgatca

SEQ ID NO: 34774 - DNA, 19 bp, synthetic construct
  source 1..19: mol_type = other DNA
acacatctctgaactgatc

SEQ ID NO: 34775 - DNA, 19 bp, synthetic construct
  source 1..19: mol_type = other DNA
gacacatctctgaactgat

SEQ ID NO: 34776 - DNA, 19 bp, synthetic construct
  source 1..19: mol_type = other DNA
tgacacatctctgaactga

SEQ ID NO: 34777 - DNA, 19 bp, synthetic construct
  source 1..19: mol_type = other DNA
ctgacacatctctgaactg

SEQ ID NO: 34778 - DNA, 19 bp, synthetic construct
  source 1..19: mol_type = other DNA
tctgacacatctctgaact

SEQ ID NO: 34779 - DNA, 19 bp, synthetic construct
  source 1..19: mol_type = other DNA
ttctgacacatctctgaac

SEQ ID NO: 34780 - DNA, 19 bp, synthetic construct
  source 1..19: mol_type = other DNA
attctgacacatctctgaa

SEQ ID NO: 34781 - DNA, 19 bp, synthetic construct
  source 1..19: mol_type = other DNA
cattctgacacatctctga

SEQ ID NO: 34782 - DNA, 19 bp, synthetic construct
  source 1..19: mol_type = other DNA
gcattctgacacatctctg

SEQ ID NO: 34783 - DNA, 19 bp, synthetic construct
  source 1..19: mol_type = other DNA
ggcattctgacacatctct

SEQ ID NO: 34784 - DNA, 19 bp, synthetic construct
  source 1..19: mol_type = other DNA
gggcattctgacacatctc

SEQ ID NO: 34785 - DNA, 19 bp, synthetic construct
  source 1..19: mol_type = other DNA
tgggcattctgacacatct

SEQ ID NO: 34786 - DNA, 19 bp, synthetic construct
  source 1..19: mol_type = other DNA
atgggcattctgacacatc

SEQ ID NO: 34787 - DNA, 19 bp, synthetic construct
  source 1..19: mol_type = other DNA
catgggcattctgacacat

SEQ ID NO: 34788 - DNA, 19 bp, synthetic construct
  source 1..19: mol_type = other DNA
acatgggcattctgacaca

SEQ ID NO: 34789 - DNA, 19 bp, synthetic construct
  source 1..19: mol_type = other DNA
tacatgggcattctgacac

SEQ ID NO: 34790 - DNA, 19 bp, synthetic construct
  source 1..19: mol_type = other DNA
ctacatgggcattctgaca

SEQ ID NO: 34791 - DNA, 19 bp, synthetic construct
  source 1..19: mol_type = other DNA
cctacatgggcattctgac

SEQ ID NO: 34792 - DNA, 19 bp, synthetic construct
  source 1..19: mol_type = other DNA
gcctacatgggcattctga

SEQ ID NO: 34793 - DNA, 19 bp, synthetic construct
  source 1..19: mol_type = other DNA
tgcctacatgggcattctg

SEQ ID NO: 34794 - DNA, 19 bp, synthetic construct
  source 1..19: mol_type = other DNA
ctgcctacatgggcattct

SEQ ID NO: 34795 - DNA, 19 bp, synthetic construct
  source 1..19: mol_type = other DNA
tctgcctacatgggcattc

SEQ ID NO: 34796 - DNA, 19 bp, synthetic construct
  source 1..19: mol_type = other DNA
atctgcctacatgggcatt

SEQ ID NO: 34797 - DNA, 19 bp, synthetic construct
  source 1..19: mol_type = other DNA
gatctgcctacatgggcat

SEQ ID NO: 34798 - DNA, 19 bp, synthetic construct
  source 1..19: mol_type = other DNA
agatctgcctacatgggca

SEQ ID NO: 34799 - DNA, 19 bp, synthetic construct
  source 1..19: mol_type = other DNA
tagatctgcctacatgggc

SEQ ID NO: 34800 - DNA, 19 bp, synthetic construct
  source 1..19: mol_type = other DNA
ttagatctgcctacatggg

SEQ ID NO: 34801 - DNA, 19 bp, synthetic construct
  source 1..19: mol_type = other DNA
cttagatctgcctacatgg

SEQ ID NO: 34802 - DNA, 19 bp, synthetic construct
  source 1..19: mol_type = other DNA
tcttagatctgcctacatg

SEQ ID NO: 34803 - DNA, 19 bp, synthetic construct
  source 1..19: mol_type = other DNA
gtcttagatctgcctacat

SEQ ID NO: 34804 - DNA, 19 bp, synthetic construct
  source 1..19: mol_type = other DNA
tgtcttagatctgcctaca

SEQ ID NO: 34805 - DNA, 19 bp, synthetic construct
  source 1..19: mol_type = other DNA
ttgtcttagatctgcctac

SEQ ID NO: 34806 - DNA, 19 bp, synthetic construct
  source 1..19: mol_type = other DNA
cttgtcttagatctgccta

SEQ ID NO: 34807 - DNA, 19 bp, synthetic construct
  source 1..19: mol_type = other DNA
gcttgtcttagatctgcct

SEQ ID NO: 34808 - DNA, 19 bp, synthetic construct
  source 1..19: mol_type = other DNA
cgcttgtcttagatctgcc

SEQ ID NO: 34809 - DNA, 19 bp, synthetic construct
  source 1..19: mol_type = other DNA
acgcttgtcttagatctgc

SEQ ID NO: 34810 - DNA, 19 bp, synthetic construct
  source 1..19: mol_type = other DNA
gacgcttgtcttagatctg

SEQ ID NO: 34811 - DNA, 19 bp, synthetic construct
  source 1..19: mol_type = other DNA
ggacgcttgtcttagatct

SEQ ID NO: 34812 - DNA, 19 bp, synthetic construct
  source 1..19: mol_type = other DNA
tggacgcttgtcttagatc

SEQ ID NO: 34813 - DNA, 19 bp, synthetic construct
  source 1..19: mol_type = other DNA
atggacgcttgtcttagat

SEQ ID NO: 34814 - DNA, 19 bp, synthetic construct
  source 1..19: mol_type = other DNA
gatggacgcttgtcttaga

SEQ ID NO: 34815 - DNA, 19 bp, synthetic construct
  source 1..19: mol_type = other DNA
tgatggacgcttgtcttag

SEQ ID NO: 34816 - DNA, 19 bp, synthetic construct
  source 1..19: mol_type = other DNA
gtgatggacgcttgtctta

SEQ ID NO: 34817 - DNA, 19 bp, synthetic construct
  source 1..19: mol_type = other DNA
ggtgatggacgcttgtctt

SEQ ID NO: 34818 - DNA, 19 bp, synthetic construct
  source 1..19: mol_type = other DNA
aggtgatggacgcttgtct

SEQ ID NO: 34819 - DNA, 19 bp, synthetic construct
  source 1..19: mol_type = other DNA
caggtgatggacgcttgtc

SEQ ID NO: 34820 - DNA, 19 bp, synthetic construct
  source 1..19: mol_type = other DNA
ccaggtgatggacgcttgt

SEQ ID NO: 34821 - DNA, 19 bp, synthetic construct
  source 1..19: mol_type = other DNA
cccaggtgatggacgcttg

SEQ ID NO: 34822 - DNA, 19 bp, synthetic construct
  source 1..19: mol_type = other DNA
acccaggtgatggacgctt

SEQ ID NO: 34823 - DNA, 19 bp, synthetic construct
  source 1..19: mol_type = other DNA
cacccaggtgatggacgct

SEQ ID NO: 34824 - DNA, 19 bp, synthetic construct
  source 1..19: mol_type = other DNA
tcacccaggtgatggacgc

SEQ ID NO: 34825 - DNA, 19 bp, synthetic construct
  source 1..19: mol_type = other DNA
atcacccaggtgatggacg

SEQ ID NO: 34826 - DNA, 19 bp, synthetic construct
  source 1..19: mol_type = other DNA
gatcacccaggtgatggac

SEQ ID NO: 34827 - DNA, 19 bp, synthetic construct
  source 1..19: mol_type = other DNA
tgatcacccaggtgatgga

SEQ ID NO: 34828 - DNA, 19 bp, synthetic construct
  source 1..19: mol_type = other DNA
ctgatcacccaggtgatgg

SEQ ID NO: 34829 - DNA, 19 bp, synthetic construct
  source 1..19: mol_type = other DNA
tatctctgcactgatcacc

SEQ ID NO: 34830 - DNA, 19 bp, synthetic construct
  source 1..19: mol_type = other DNA
atatctctgcactgatcac

SEQ ID NO: 34831 - DNA, 19 bp, synthetic construct
  source 1..19: mol_type = other DNA
catatctctgcactgatca

SEQ ID NO: 34832 - DNA, 19 bp, synthetic construct
  source 1..19: mol_type = other DNA
acatatctctgcactgatc

SEQ ID NO: 34833 - DNA, 19 bp, synthetic construct
  source 1..19: mol_type = other DNA
tacatatctctgcactgat

SEQ ID NO: 34834 - DNA, 19 bp, synthetic construct
  source 1..19: mol_type = other DNA
gtacatatctctgcactga

SEQ ID NO: 34835 - DNA, 19 bp, synthetic construct
  source 1..19: mol_type = other DNA
ggtacatatctctgcactg

SEQ ID NO: 34836 - DNA, 19 bp, synthetic construct
  source 1..19: mol_type = other DNA
tggtacatatctctgcact

SEQ ID NO: 34837 - DNA, 19 bp, synthetic construct
  source 1..19: mol_type = other DNA
ctggtacatatctctgcac

SEQ ID NO: 34838 - DNA, 19 bp, synthetic construct
  source 1..19: mol_type = other DNA
actggtacatatctctgca

SEQ ID NO: 34839 - DNA, 19 bp, synthetic construct
  source 1..19: mol_type = other DNA
cactggtacatatctctgc

SEQ ID NO: 34840 - DNA, 19 bp, synthetic construct
  source 1..19: mol_type = other DNA
acactggtacatatctctg

SEQ ID NO: 34841 - DNA, 19 bp, synthetic construct
  source 1..19: mol_type = other DNA
gacactggtacatatctct

SEQ ID NO: 34842 - DNA, 19 bp, synthetic construct
  source 1..19: mol_type = other DNA
ggacactggtacatatctc

SEQ ID NO: 34843 - DNA, 19 bp, synthetic construct
  source 1..19: mol_type = other DNA
gggacactggtacatatct

SEQ ID NO: 34844 - DNA, 19 bp, synthetic construct
  source 1..19: mol_type = other DNA
ggggacactggtacatatc

SEQ ID NO: 34845 - DNA, 19 bp, synthetic construct
  source 1..19: mol_type = other DNA
aggggacactggtacatat

SEQ ID NO: 34846 - DNA, 19 bp, synthetic construct
  source 1..19: mol_type = other DNA
caggggacactggtacata

SEQ ID NO: 34847 - DNA, 19 bp, synthetic construct
  source 1..19: mol_type = other DNA
acaggggacactggtacat

SEQ ID NO: 34848 - DNA, 19 bp, synthetic construct
  source 1..19: mol_type = other DNA
tacaggggacactggtaca

SEQ ID NO: 34849 - DNA, 19 bp, synthetic construct
  source 1..19: mol_type = other DNA
ctacaggggacactggtac

SEQ ID NO: 34850 - DNA, 19 bp, synthetic construct
  source 1..19: mol_type = other DNA
cctacaggggacactggta

SEQ ID NO: 34851 - DNA, 19 bp, synthetic construct
  source 1..19: mol_type = other DNA
gcctacaggggacactggt

SEQ ID NO: 34852 - DNA, 19 bp, synthetic construct
  source 1..19: mol_type = other DNA
tgcctacaggggacactgg

SEQ ID NO: 34853 - DNA, 19 bp, synthetic construct
  source 1..19: mol_type = other DNA
ctgcctacaggggacactg

SEQ ID NO: 34854 - DNA, 19 bp, synthetic construct
  source 1..19: mol_type = other DNA
actgcctacaggggacact

SEQ ID NO: 34855 - DNA, 19 bp, synthetic construct
  source 1..19: mol_type = other DNA
cactgcctacaggggacac

SEQ ID NO: 34856 - DNA, 19 bp, synthetic construct
  source 1..19: mol_type = other DNA
gcactgcctacaggggaca

SEQ ID NO: 34857 - DNA, 19 bp, synthetic construct
  source 1..19: mol_type = other DNA
taggcactgcctacagggg

SEQ ID NO: 34858 - DNA, 19 bp, synthetic construct
  source 1..19: mol_type = other DNA
ctaggcactgcctacaggg

SEQ ID NO: 34859 - DNA, 19 bp, synthetic construct
  source 1..19: mol_type = other DNA
tctaggcactgcctacagg

SEQ ID NO: 34860 - DNA, 19 bp, synthetic construct
  source 1..19: mol_type = other DNA
gtctaggcactgcctacag

SEQ ID NO: 34861 - DNA, 19 bp, synthetic construct
  source 1..19: mol_type = other DNA
tgtctaggcactgcctaca

SEQ ID NO: 34862 - DNA, 19 bp, synthetic construct
  source 1..19: mol_type = other DNA
ttgtctaggcactgcctac

SEQ ID NO: 34863 - DNA, 19 bp, synthetic construct
  source 1..19: mol_type = other DNA
cttgtctaggcactgccta

SEQ ID NO: 34864 - DNA, 19 bp, synthetic construct
  source 1..19: mol_type = other DNA
tcttgtctaggcactgcct

SEQ ID NO: 34865 - DNA, 19 bp, synthetic construct
  source 1..19: mol_type = other DNA
ctcttgtctaggcactgcc

SEQ ID NO: 34866 - DNA, 19 bp, synthetic construct
  source 1..19: mol_type = other DNA
actcttgtctaggcactgc

SEQ ID NO: 34867 - DNA, 19 bp, synthetic construct
  source 1..19: mol_type = other DNA
aactcttgtctaggcactg

SEQ ID NO: 34868 - DNA, 19 bp, synthetic construct
  source 1..19: mol_type = other DNA
caactcttgtctaggcact

SEQ ID NO: 34869 - DNA, 19 bp, synthetic construct
  source 1..19: mol_type = other DNA
tcaactcttgtctaggcac

SEQ ID NO: 34870 - DNA, 19 bp, synthetic construct
  source 1..19: mol_type = other DNA
ttcaactcttgtctaggca

SEQ ID NO: 34871 - DNA, 19 bp, synthetic construct
  source 1..19: mol_type = other DNA
attcaactcttgtctaggc

SEQ ID NO: 34872 - DNA, 19 bp, synthetic construct
  source 1..19: mol_type = other DNA
gattcaactcttgtctagg

SEQ ID NO: 34873 - DNA, 19 bp, synthetic construct
  source 1..19: mol_type = other DNA
tgattcaactcttgtctag

SEQ ID NO: 34874 - DNA, 19 bp, synthetic construct
  source 1..19: mol_type = other DNA
gtgattcaactcttgtcta

SEQ ID NO: 34875 - DNA, 19 bp, synthetic construct
  source 1..19: mol_type = other DNA
ggtgattcaactcttgtct

SEQ ID NO: 34876 - DNA, 19 bp, synthetic construct
  source 1..19: mol_type = other DNA
aggtgattcaactcttgtc

SEQ ID NO: 34877 - DNA, 19 bp, synthetic construct
  source 1..19: mol_type = other DNA
gaggtgattcaactcttgt

SEQ ID NO: 34878 - DNA, 19 bp, synthetic construct
  source 1..19: mol_type = other DNA
tgaggtgattcaactcttg

SEQ ID NO: 34879 - DNA, 19 bp, synthetic construct
  source 1..19: mol_type = other DNA
ctgaggtgattcaactctt

SEQ ID NO: 34880 - DNA, 19 bp, synthetic construct
  source 1..19: mol_type = other DNA
tctgaggtgattcaactct

SEQ ID NO: 34881 - DNA, 19 bp, synthetic construct
  source 1..19: mol_type = other DNA
ctctgaggtgattcaactc

SEQ ID NO: 34882 - DNA, 19 bp, synthetic construct
  source 1..19: mol_type = other DNA
tctctgaggtgattcaact

SEQ ID NO: 34883 - DNA, 19 bp, synthetic construct
  source 1..19: mol_type = other DNA
atctctgaggtgattcaac

SEQ ID NO: 34884 - DNA, 19 bp, synthetic construct
  source 1..19: mol_type = other DNA
gatctctgaggtgattcaa

SEQ ID NO: 34885 - DNA, 19 bp, synthetic construct
  source 1..19: mol_type = other DNA
tgatctctgaggtgattca

SEQ ID NO: 34886 - DNA, 19 bp, synthetic construct
  source 1..19: mol_type = other DNA
ctgatctctgaggtgattc

SEQ ID NO: 34887 - DNA, 19 bp, synthetic construct
  source 1..19: mol_type = other DNA
actgatctctgaggtgatt

SEQ ID NO: 34888 - DNA, 19 bp, synthetic construct
  source 1..19: mol_type = other DNA
cactgatctctgaggtgat

SEQ ID NO: 34889 - DNA, 19 bp, synthetic construct
  source 1..19: mol_type = other DNA
gcactgatctctgaggtga

SEQ ID NO: 34890 - DNA, 19 bp, synthetic construct
  source 1..19: mol_type = other DNA
tgcactgatctctgaggtg

SEQ ID NO: 34891 - DNA, 19 bp, synthetic construct
  source 1..19: mol_type = other DNA
atgcactgatctctgaggt

SEQ ID NO: 34892 - DNA, 19 bp, synthetic construct
  source 1..19: mol_type = other DNA
tatgcactgatctctgagg

SEQ ID NO: 34893 - DNA, 19 bp, synthetic construct
  source 1..19: mol_type = other DNA
ctatgcactgatctctgag

SEQ ID NO: 34894 - DNA, 19 bp, synthetic construct
  source 1..19: mol_type = other DNA
tctatgcactgatctctga

SEQ ID NO: 34895 - DNA, 19 bp, synthetic construct
  source 1..19: mol_type = other DNA
atctatgcactgatctctg

SEQ ID NO: 34896 - DNA, 19 bp, synthetic construct
  source 1..19: mol_type = other DNA
tatctatgcactgatctct

SEQ ID NO: 34897 - DNA, 19 bp, synthetic construct
  source 1..19: mol_type = other DNA
atatctatgcactgatctc

SEQ ID NO: 34898 - DNA, 19 bp, synthetic construct
  source 1..19: mol_type = other DNA
catatctatgcactgatct

SEQ ID NO: 34899 - DNA, 19 bp, synthetic construct
  source 1..19: mol_type = other DNA
acatatctatgcactgatc

SEQ ID NO: 34900 - DNA, 19 bp, synthetic construct
  source 1..19: mol_type = other DNA
gacatatctatgcactgat

SEQ ID NO: 34901 - DNA, 19 bp, synthetic construct
  source 1..19: mol_type = other DNA
tgacatatctatgcactga

SEQ ID NO: 34902 - DNA, 19 bp, synthetic construct
  source 1..19: mol_type = other DNA
gtgacatatctatgcactg

SEQ ID NO: 34903 - DNA, 19 bp, synthetic construct
  source 1..19: mol_type = other DNA
tgtgacatatctatgcact

SEQ ID NO: 34904 - DNA, 19 bp, synthetic construct
  source 1..19: mol_type = other DNA
ttgtgacatatctatgcac

SEQ ID NO: 34905 - DNA, 19 bp, synthetic construct
  source 1..19: mol_type = other DNA
tttgtgacatatctatgca

SEQ ID NO: 34906 - DNA, 19 bp, synthetic construct
  source 1..19: mol_type = other DNA
ctttgtgacatatctatgc

SEQ ID NO: 34907 - DNA, 19 bp, synthetic construct
  source 1..19: mol_type = other DNA
gctttgtgacatatctatg

SEQ ID NO: 34908 - DNA, 19 bp, synthetic construct
  source 1..19: mol_type = other DNA
ggctttgtgacatatctat

SEQ ID NO: 34909 - DNA, 19 bp, synthetic construct
  source 1..19: mol_type = other DNA
aggctttgtgacatatcta

SEQ ID NO: 34910 - DNA, 19 bp, synthetic construct
  source 1..19: mol_type = other DNA
aaggctttgtgacatatct

SEQ ID NO: 34911 - DNA, 19 bp, synthetic construct
  source 1..19: mol_type = other DNA
gaaggctttgtgacatatc

SEQ ID NO: 34912 - DNA, 19 bp, synthetic construct
  source 1..19: mol_type = other DNA
agaaggctttgtgacatat

SEQ ID NO: 34913 - DNA, 19 bp, synthetic construct
  source 1..19: mol_type = other DNA
cagaaggctttgtgacata

SEQ ID NO: 34914 - DNA, 19 bp, synthetic construct
  source 1..19: mol_type = other DNA
acagaaggctttgtgacat

SEQ ID NO: 34915 - DNA, 19 bp, synthetic construct
  source 1..19: mol_type = other DNA
tacagaaggctttgtgaca

SEQ ID NO: 34916 - DNA, 19 bp, synthetic construct
  source 1..19: mol_type = other DNA
ctacagaaggctttgtgac

SEQ ID NO: 34917 - DNA, 19 bp, synthetic construct
  source 1..19: mol_type = other DNA
cctacagaaggctttgtga

SEQ ID NO: 34918 - DNA, 19 bp, synthetic construct
  source 1..19: mol_type = other DNA
gcctacagaaggctttgtg

SEQ ID NO: 34919 - DNA, 19 bp, synthetic construct
  source 1..19: mol_type = other DNA
tgcctacagaaggctttgt

SEQ ID NO: 34920 - DNA, 19 bp, synthetic construct
  source 1..19: mol_type = other DNA
ttgcctacagaaggctttg

SEQ ID NO: 34921 - DNA, 19 bp, synthetic construct
  source 1..19: mol_type = other DNA
tttgcctacagaaggcttt

SEQ ID NO: 34922 - DNA, 19 bp, synthetic construct
  source 1..19: mol_type = other DNA
ctttgcctacagaaggctt

SEQ ID NO: 34923 - DNA, 19 bp, synthetic construct
  source 1..19: mol_type = other DNA
gctttgcctacagaaggct

SEQ ID NO: 34924 - DNA, 19 bp, synthetic construct
  source 1..19: mol_type = other DNA
ggctttgcctacagaaggc

SEQ ID NO: 34925 - DNA, 19 bp, synthetic construct
  source 1..19: mol_type = other DNA
gggctttgcctacagaagg

SEQ ID NO: 34926 - DNA, 19 bp, synthetic construct
  source 1..19: mol_type = other DNA
tgggctttgcctacagaag

SEQ ID NO: 34927 - DNA, 19 bp, synthetic construct
  source 1..19: mol_type = other DNA
atgggctttgcctacagaa

SEQ ID NO: 34928 - DNA, 19 bp, synthetic construct
  source 1..19: mol_type = other DNA
tatgggctttgcctacaga

SEQ ID NO: 34929 - DNA, 19 bp, synthetic construct
  source 1..19: mol_type = other DNA
gtatgggctttgcctacag

SEQ ID NO: 34930 - DNA, 19 bp, synthetic construct
  source 1..19: mol_type = other DNA
tgtatgggctttgcctaca

SEQ ID NO: 34931 - DNA, 19 bp, synthetic construct
  source 1..19: mol_type = other DNA
ttgtatgggctttgcctac

SEQ ID NO: 34932 - DNA, 19 bp, synthetic construct
  source 1..19: mol_type = other DNA
cttgtatgggctttgccta

SEQ ID NO: 34933 - DNA, 19 bp, synthetic construct
  source 1..19: mol_type = other DNA
ccttgtatgggctttgcct

SEQ ID NO: 34934 - DNA, 19 bp, synthetic construct
  source 1..19: mol_type = other DNA
accttgtatgggctttgcc

SEQ ID NO: 34935 - DNA, 19 bp, synthetic construct
  source 1..19: mol_type = other DNA
aaccttgtatgggctttgc

SEQ ID NO: 34936 - DNA, 19 bp, synthetic construct
  source 1..19: mol_type = other DNA
aaaccttgtatgggctttg

SEQ ID NO: 34937 - DNA, 19 bp, synthetic construct
  source 1..19: mol_type = other DNA
taaaccttgtatgggcttt

SEQ ID NO: 34938 - DNA, 19 bp, synthetic construct
  source 1..19: mol_type = other DNA
ctaaaccttgtatgggctt

SEQ ID NO: 34939 - DNA, 19 bp, synthetic construct
  source 1..19: mol_type = other DNA
tctaaaccttgtatgggct

SEQ ID NO: 34940 - DNA, 19 bp, synthetic construct
  source 1..19: mol_type = other DNA
atctaaaccttgtatgggc

SEQ ID NO: 34941 - DNA, 19 bp, synthetic construct
  source 1..19: mol_type = other DNA
gatctaaaccttgtatggg

SEQ ID NO: 34942 - DNA, 19 bp, synthetic construct
  source 1..19: mol_type = other DNA
tgatctaaaccttgtatgg

SEQ ID NO: 34943 - DNA, 19 bp, synthetic construct
  source 1..19: mol_type = other DNA
gtgatctaaaccttgtatg

SEQ ID NO: 34944 - DNA, 19 bp, synthetic construct
  source 1..19: mol_type = other DNA
ggtgatctaaaccttgtat

SEQ ID NO: 34945 - DNA, 19 bp, synthetic construct
  source 1..19: mol_type = other DNA
aggtgatctaaaccttgta

SEQ ID NO: 34946 - DNA, 19 bp, synthetic construct
  source 1..19: mol_type = other DNA
taggtgatctaaaccttgt

SEQ ID NO: 34947 - DNA, 19 bp, synthetic construct
  source 1..19: mol_type = other DNA
ctaggtgatctaaaccttg

SEQ ID NO: 34948 - DNA, 19 bp, synthetic construct
  source 1..19: mol_type = other DNA
cctaggtgatctaaacctt

SEQ ID NO: 34949 - DNA, 19 bp, synthetic construct
  source 1..19: mol_type = other DNA
acctaggtgatctaaacct

SEQ ID NO: 34950 - DNA, 19 bp, synthetic construct
  source 1..19: mol_type = other DNA
cacctaggtgatctaaacc

SEQ ID NO: 34951 - DNA, 19 bp, synthetic construct
  source 1..19: mol_type = other DNA
tcacctaggtgatctaaac

SEQ ID NO: 34952 - DNA, 19 bp, synthetic construct
  source 1..19: mol_type = other DNA
atcacctaggtgatctaaa

SEQ ID NO: 34953 - DNA, 19 bp, synthetic construct
  source 1..19: mol_type = other DNA
gatcacctaggtgatctaa

SEQ ID NO: 34954 - DNA, 19 bp, synthetic construct
  source 1..19: mol_type = other DNA
tgatcacctaggtgatcta

SEQ ID NO: 34955 - DNA, 19 bp, synthetic construct
  source 1..19: mol_type = other DNA
ctgatcacctaggtgatct

SEQ ID NO: 34956 - DNA, 19 bp, synthetic construct
  source 1..19: mol_type = other DNA
actgatcacctaggtgatc

SEQ ID NO: 34957 - DNA, 19 bp, synthetic construct
  source 1..19: mol_type = other DNA
cactgatcacctaggtgat

SEQ ID NO: 34958 - DNA, 19 bp, synthetic construct
  source 1..19: mol_type = other DNA
gcactgatcacctaggtga

SEQ ID NO: 34959 - DNA, 19 bp, synthetic construct
  source 1..19: mol_type = other DNA
tgcactgatcacctaggtg

SEQ ID NO: 34960 - DNA, 19 bp, synthetic construct
  source 1..19: mol_type = other DNA
ctgcactgatcacctaggt

SEQ ID NO: 34961 - DNA, 19 bp, synthetic construct
  source 1..19: mol_type = other DNA
actgcactgatcacctagg

SEQ ID NO: 34962 - DNA, 19 bp, synthetic construct
  source 1..19: mol_type = other DNA
cactgcactgatcacctag

SEQ ID NO: 34963 - DNA, 19 bp, synthetic construct
  source 1..19: mol_type = other DNA
tcactgcactgatcaccta

SEQ ID NO: 34964 - DNA, 19 bp, synthetic construct
  source 1..19: mol_type = other DNA
atcactgcactgatcacct

SEQ ID NO: 34965 - DNA, 19 bp, synthetic construct
  source 1..19: mol_type = other DNA
tatcactgcactgatcacc

SEQ ID NO: 34966 - DNA, 19 bp, synthetic construct
  source 1..19: mol_type = other DNA
atatcactgcactgatcac

SEQ ID NO: 34967 - DNA, 19 bp, synthetic construct
  source 1..19: mol_type = other DNA
catatcactgcactgatca

SEQ ID NO: 34968 - DNA, 19 bp, synthetic construct
  source 1..19: mol_type = other DNA
acatatcactgcactgatc

SEQ ID NO: 34969 - DNA, 19 bp, synthetic construct
  source 1..19: mol_type = other DNA
gacatatcactgcactgat

SEQ ID NO: 34970 - DNA, 19 bp, synthetic construct
  source 1..19: mol_type = other DNA
tgacatatcactgcactga

SEQ ID NO: 34971 - DNA, 19 bp, synthetic construct
  source 1..19: mol_type = other DNA
gtgacatatcactgcactg

SEQ ID NO: 34972 - DNA, 19 bp, synthetic construct
  source 1..19: mol_type = other DNA
tgtgacatatcactgcact

SEQ ID NO: 34973 - DNA, 19 bp, synthetic construct
  source 1..19: mol_type = other DNA
ttgtgacatatcactgcac

SEQ ID NO: 34974 - DNA, 19 bp, synthetic construct
  source 1..19: mol_type = other DNA
tttgtgacatatcactgca

SEQ ID NO: 34975 - DNA, 19 bp, synthetic construct
  source 1..19: mol_type = other DNA
ttttgtgacatatcactgc

SEQ ID NO: 34976 - DNA, 19 bp, synthetic construct
  source 1..19: mol_type = other DNA
ggatttttgtgacatatca

SEQ ID NO: 34977 - DNA, 19 bp, synthetic construct
  source 1..19: mol_type = other DNA
gggatttttgtgacatatc

SEQ ID NO: 34978 - DNA, 19 bp, synthetic construct
  source 1..19: mol_type = other DNA
agggatttttgtgacatat

SEQ ID NO: 34979 - DNA, 19 bp, synthetic construct
  source 1..19: mol_type = other DNA
cagggatttttgtgacata

SEQ ID NO: 34980 - DNA, 19 bp, synthetic construct
  source 1..19: mol_type = other DNA
acagggatttttgtgacat

SEQ ID NO: 34981 - DNA, 19 bp, synthetic construct
  source 1..19: mol_type = other DNA
tacagggatttttgtgaca

SEQ ID NO: 34982 - DNA, 19 bp, synthetic construct
  source 1..19: mol_type = other DNA
ctacagggatttttgtgac

SEQ ID NO: 34983 - DNA, 19 bp, synthetic construct
  source 1..19: mol_type = other DNA
tctacagggatttttgtga

SEQ ID NO: 34984 - DNA, 19 bp, synthetic construct
  source 1..19: mol_type = other DNA
gtctacagggatttttgtg

SEQ ID NO: 34985 - DNA, 19 bp, synthetic construct
  source 1..19: mol_type = other DNA
tgtctacagggatttttgt

SEQ ID NO: 34986 - DNA, 19 bp, synthetic construct
  source 1..19: mol_type = other DNA
ctgtctacagggatttttg

SEQ ID NO: 34987 - DNA, 19 bp, synthetic construct
  source 1..19: mol_type = other DNA
tctgtctacagggattttt

SEQ ID NO: 34988 - DNA, 19 bp, synthetic construct
  source 1..19: mol_type = other DNA
ctctgtctacagggatttt

SEQ ID NO: 34989 - DNA, 19 bp, synthetic construct
  source 1..19: mol_type = other DNA
gctctgtctacagggattt

SEQ ID NO: 34990 - DNA, 19 bp, synthetic construct
  source 1..19: mol_type = other DNA
ggctctgtctacagggatt

SEQ ID NO: 34991 - DNA, 19 bp, synthetic construct
  source 1..19: mol_type = other DNA
aggctctgtctacagggat

SEQ ID NO: 34992 - DNA, 19 bp, synthetic construct
  source 1..19: mol_type = other DNA
taggctctgtctacaggga

SEQ ID NO: 34993 - DNA, 19 bp, synthetic construct
  source 1..19: mol_type = other DNA
ctaggctctgtctacaggg

SEQ ID NO: 34994 - DNA, 19 bp, synthetic construct
  source 1..19: mol_type = other DNA
tctaggctctgtctacagg

SEQ ID NO: 34995 - DNA, 19 bp, synthetic construct
  source 1..19: mol_type = other DNA
gtctaggctctgtctacag

SEQ ID NO: 34996 - DNA, 19 bp, synthetic construct
  source 1..19: mol_type = other DNA
cttgtctaggctctgtcta

SEQ ID NO: 34997 - DNA, 19 bp, synthetic construct
  source 1..19: mol_type = other DNA
tcttgtctaggctctgtct

SEQ ID NO: 34998 - DNA, 19 bp, synthetic construct
  source 1..19: mol_type = other DNA
ctcttgtctaggctctgtc

SEQ ID NO: 34999 - DNA, 19 bp, synthetic construct
  source 1..19: mol_type = other DNA
actcttgtctaggctctgt

SEQ ID NO: 35000 - DNA, 19 bp, synthetic construct
  source 1..19: mol_type = other DNA
taactcttgtctaggctct

SEQ ID NO: 35001 - DNA, 19 bp, synthetic construct
  source 1..19: mol_type = other DNA
gtaactcttgtctaggctc

SEQ ID NO: 35002 - DNA, 19 bp, synthetic construct
  source 1..19: mol_type = other DNA
agtaactcttgtctaggct

SEQ ID NO: 35003 - DNA, 19 bp, synthetic construct
  source 1..19: mol_type = other DNA
aagtaactcttgtctaggc

SEQ ID NO: 35004 - DNA, 19 bp, synthetic construct
  source 1..19: mol_type = other DNA
gaagtaactcttgtctagg

SEQ ID NO: 35005 - DNA, 19 bp, synthetic construct
  source 1..19: mol_type = other DNA
gtgaagtaactcttgtcta

SEQ ID NO: 35006 - DNA, 19 bp, synthetic construct
  source 1..19: mol_type = other DNA
ggtgaagtaactcttgtct

SEQ ID NO: 35007 - DNA, 19 bp, synthetic construct
  source 1..19: mol_type = other DNA
aggtgaagtaactcttgtc

SEQ ID NO: 35008 - DNA, 19 bp, synthetic construct
  source 1..19: mol_type = other DNA
caggtgaagtaactcttgt

SEQ ID NO: 35009 - DNA, 19 bp, synthetic construct
  source 1..19: mol_type = other DNA
ccaggtgaagtaactcttg

SEQ ID NO: 35010 - DNA, 19 bp, synthetic construct
  source 1..19: mol_type = other DNA
cccaggtgaagtaactctt

SEQ ID NO: 35011 - DNA, 19 bp, synthetic construct
  source 1..19: mol_type = other DNA
acccaggtgaagtaactct

SEQ ID NO: 35012 - DNA, 19 bp, synthetic construct
  source 1..19: mol_type = other DNA
cacccaggtgaagtaactc

SEQ ID NO: 35013 - DNA, 19 bp, synthetic construct
  source 1..19: mol_type = other DNA
tcacccaggtgaagtaact

SEQ ID NO: 35014 - DNA, 19 bp, synthetic construct
  source 1..19: mol_type = other DNA
atcacccaggtgaagtaac

SEQ ID NO: 35015 - DNA, 19 bp, synthetic construct
  source 1..19: mol_type = other DNA
gatcacccaggtgaagtaa

SEQ ID NO: 35016 - DNA, 19 bp, synthetic construct
  source 1..19: mol_type = other DNA
tgatcacccaggtgaagta

SEQ ID NO: 35017 - DNA, 19 bp, synthetic construct
  source 1..19: mol_type = other DNA
ctgatcacccaggtgaagt

SEQ ID NO: 35018 - DNA, 19 bp, synthetic construct
  source 1..19: mol_type = other DNA
actgatcacccaggtgaag

SEQ ID NO: 35019 - DNA, 19 bp, synthetic construct
  source 1..19: mol_type = other DNA
cactgatcacccaggtgaa

SEQ ID NO: 35020 - DNA, 19 bp, synthetic construct
  source 1..19: mol_type = other DNA
atctgcactgatcacccag

SEQ ID NO: 35021 - DNA, 19 bp, synthetic construct
  source 1..19: mol_type = other DNA
tatctgcactgatcaccca

SEQ ID NO: 35022 - DNA, 19 bp, synthetic construct
  source 1..19: mol_type = other DNA
atatctgcactgatcaccc

SEQ ID NO: 35023 - DNA, 19 bp, synthetic construct
  source 1..19: mol_type = other DNA
aatatctgcactgatcacc

SEQ ID NO: 35024 - DNA, 19 bp, synthetic construct
  source 1..19: mol_type = other DNA
caaatatctgcactgatca

SEQ ID NO: 35025 - DNA, 19 bp, synthetic construct
  source 1..19: mol_type = other DNA
gtcaaatatctgcactgat

SEQ ID NO: 35026 - DNA, 19 bp, synthetic construct
  source 1..19: mol_type = other DNA
tgtcaaatatctgcactga

SEQ ID NO: 35027 - DNA, 19 bp, synthetic construct
  source 1..19: mol_type = other DNA
gtgtcaaatatctgcactg

SEQ ID NO: 35028 - DNA, 19 bp, synthetic construct
  source 1..19: mol_type = other DNA
tgtgtcaaatatctgcact

SEQ ID NO: 35029 - DNA, 19 bp, synthetic construct
  source 1..19: mol_type = other DNA
ttgtgtcaaatatctgcac

SEQ ID NO: 35030 - DNA, 19 bp, synthetic construct
  source 1..19: mol_type = other DNA
attgtgtcaaatatctgca

SEQ ID NO: 35031 - DNA, 19 bp, synthetic construct
  source 1..19: mol_type = other DNA
cattgtgtcaaatatctgc

SEQ ID NO: 35032 - DNA, 19 bp, synthetic construct
  source 1..19: mol_type = other DNA
gcattgtgtcaaatatctg

SEQ ID NO: 35033 - DNA, 19 bp, synthetic construct
  source 1..19: mol_type = other DNA
ggcattgtgtcaaatatct

SEQ ID NO: 35034 - DNA, 19 bp, synthetic construct
  source 1..19: mol_type = other DNA
gggcattgtgtcaaatatc

SEQ ID NO: 35035 - DNA, 19 bp, synthetic construct
  source 1..19: mol_type = other DNA
ggggcattgtgtcaaatat

SEQ ID NO: 35036 - DNA, 19 bp, synthetic construct
  source 1..19: mol_type = other DNA
gggggcattgtgtcaaata

SEQ ID NO: 35037 - DNA, 19 bp, synthetic construct
  source 1..19: mol_type = other DNA
tgggggcattgtgtcaaat

SEQ ID NO: 35038 - DNA, 19 bp, synthetic construct
  source 1..19: mol_type = other DNA
atgggggcattgtgtcaaa

SEQ ID NO: 35039 - DNA, 19 bp, synthetic construct
  source 1..19: mol_type = other DNA
tatgggggcattgtgtcaa

SEQ ID NO: 35040 - DNA, 19 bp, synthetic construct
  source 1..19: mol_type = other DNA
ctatgggggcattgtgtca

SEQ ID NO: 35041 - DNA, 19 bp, synthetic construct
  source 1..19: mol_type = other DNA
tctatgggggcattgtgtc

SEQ ID NO: 35042 - DNA, 19 bp, synthetic construct
  source 1..19: mol_type = other DNA
gtctatgggggcattgtgt

SEQ ID NO: 35043 - DNA, 19 bp, synthetic construct
  source 1..19: mol_type = other DNA
tgtctatgggggcattgtg

SEQ ID NO: 35044 - DNA, 19 bp, synthetic construct
  source 1..19: mol_type = other DNA
ctgtctatgggggcattgt

SEQ ID NO: 35045 - DNA, 19 bp, synthetic construct
  source 1..19: mol_type = other DNA
tctgtctatgggggcattg

SEQ ID NO: 35046 - DNA, 19 bp, synthetic construct
  source 1..19: mol_type = other DNA
ctctgtctatgggggcatt

SEQ ID NO: 35047 - DNA, 19 bp, synthetic construct
  source 1..19: mol_type = other DNA
taggctctgtctatggggg

SEQ ID NO: 35048 - DNA, 19 bp, synthetic construct
  source 1..19: mol_type = other DNA
ctaggctctgtctatgggg

SEQ ID NO: 35049 - DNA, 19 bp, synthetic construct
  source 1..19: mol_type = other DNA
cctaggctctgtctatggg

SEQ ID NO: 35050 - DNA, 19 bp, synthetic construct
  source 1..19: mol_type = other DNA
gcctaggctctgtctatgg

SEQ ID NO: 35051 - DNA, 19 bp, synthetic construct
  source 1..19: mol_type = other DNA
tgcctaggctctgtctatg

SEQ ID NO: 35052 - DNA, 19 bp, synthetic construct
  source 1..19: mol_type = other DNA
ttgcctaggctctgtctat

SEQ ID NO: 35053 - DNA, 19 bp, synthetic construct
  source 1..19: mol_type = other DNA
cttgcctaggctctgtcta

SEQ ID NO: 35054 - DNA, 19 bp, synthetic construct
  source 1..19: mol_type = other DNA
aagtcttgcctaggctctg

SEQ ID NO: 35055 - DNA, 19 bp, synthetic construct
  source 1..19: mol_type = other DNA
gaagtcttgcctaggctct

SEQ ID NO: 35056 - DNA, 19 bp, synthetic construct
  source 1..19: mol_type = other DNA
ggaagtcttgcctaggctc

SEQ ID NO: 35057 - DNA, 19 bp, synthetic construct
  source 1..19: mol_type = other DNA
tggaagtcttgcctaggct

SEQ ID NO: 35058 - DNA, 19 bp, synthetic construct
  source 1..19: mol_type = other DNA
atggaagtcttgcctaggc

SEQ ID NO: 35059 - DNA, 19 bp, synthetic construct
  source 1..19: mol_type = other DNA
gatggaagtcttgcctagg

SEQ ID NO: 35060 - DNA, 19 bp, synthetic construct
  source 1..19: mol_type = other DNA
tgatggaagtcttgcctag

SEQ ID NO: 35061 - DNA, 19 bp, synthetic construct
  source 1..19: mol_type = other DNA
gtgatggaagtcttgccta

SEQ ID NO: 35062 - DNA, 19 bp, synthetic construct
  source 1..19: mol_type = other DNA
ggtgatggaagtcttgcct

SEQ ID NO: 35063 - DNA, 19 bp, synthetic construct
  source 1..19: mol_type = other DNA
aggtgatggaagtcttgcc

SEQ ID NO: 35064 - DNA, 19 bp, synthetic construct
  source 1..19: mol_type = other DNA
caggtgatggaagtcttgc

SEQ ID NO: 35065 - DNA, 19 bp, synthetic construct
  source 1..19: mol_type = other DNA
ccaggtgatggaagtcttg

SEQ ID NO: 35066 - DNA, 19 bp, synthetic construct
  source 1..19: mol_type = other DNA
cccaggtgatggaagtctt

SEQ ID NO: 35067 - DNA, 19 bp, synthetic construct
  source 1..19: mol_type = other DNA
acccaggtgatggaagtct

SEQ ID NO: 35068 - DNA, 19 bp, synthetic construct
  source 1..19: mol_type = other DNA
cacccaggtgatggaagtc

SEQ ID NO: 35069 - DNA, 19 bp, synthetic construct
  source 1..19: mol_type = other DNA
tcacccaggtgatggaagt

SEQ ID NO: 35070 - DNA, 19 bp, synthetic construct
  source 1..19: mol_type = other DNA
atcacccaggtgatggaag

SEQ ID NO: 35071 - DNA, 19 bp, synthetic construct
  source 1..19: mol_type = other DNA
gatcacccaggtgatggaa

SEQ ID NO: 35072 - DNA, 19 bp, synthetic construct
  source 1..19: mol_type = other DNA
gacatatctctgcactgat

SEQ ID NO: 35073 - DNA, 19 bp, synthetic construct
  source 1..19: mol_type = other DNA
tgacatatctctgcactga

SEQ ID NO: 35074 - DNA, 19 bp, synthetic construct
  source 1..19: mol_type = other DNA
gtgacatatctctgcactg

SEQ ID NO: 35075 - DNA, 19 bp, synthetic construct
  source 1..19: mol_type = other DNA
tttgtgacatatctctgca

SEQ ID NO: 35076 - DNA, 19 bp, synthetic construct
  source 1..19: mol_type = other DNA
atttgtgacatatctctgc

SEQ ID NO: 35077 - DNA, 19 bp, synthetic construct
  source 1..19: mol_type = other DNA
gatttgtgacatatctctg

SEQ ID NO: 35078 - DNA, 19 bp, synthetic construct
  source 1..19: mol_type = other DNA
ggatttgtgacatatctct

SEQ ID NO: 35079 - DNA, 19 bp, synthetic construct
  source 1..19: mol_type = other DNA
gggatttgtgacatatctc

SEQ ID NO: 35080 - DNA, 19 bp, synthetic construct
  source 1..19: mol_type = other DNA
ggggatttgtgacatatct

SEQ ID NO: 35081 - DNA, 19 bp, synthetic construct
  source 1..19: mol_type = other DNA
gggggatttgtgacatatc

SEQ ID NO: 35082 - DNA, 19 bp, synthetic construct
  source 1..19: mol_type = other DNA
agggggatttgtgacatat

SEQ ID NO: 35083 - DNA, 19 bp, synthetic construct
  source 1..19: mol_type = other DNA
gagggggatttgtgacata

SEQ ID NO: 35084 - DNA, 19 bp, synthetic construct
  source 1..19: mol_type = other DNA
agagggggatttgtgacat

SEQ ID NO: 35085 - DNA, 19 bp, synthetic construct
  source 1..19: mol_type = other DNA
tagagggggatttgtgaca

SEQ ID NO: 35086 - DNA, 19 bp, synthetic construct
  source 1..19: mol_type = other DNA
ctagagggggatttgtgac

SEQ ID NO: 35087 - DNA, 19 bp, synthetic construct
  source 1..19: mol_type = other DNA
cctagagggggatttgtga

SEQ ID NO: 35088 - DNA, 19 bp, synthetic construct
  source 1..19: mol_type = other DNA
gcctagagggggatttgtg

SEQ ID NO: 35089 - DNA, 19 bp, synthetic construct
  source 1..19: mol_type = other DNA
tgcctagagggggatttgt

SEQ ID NO: 35090 - DNA, 19 bp, synthetic construct
  source 1..19: mol_type = other DNA
ctgcctagagggggatttg

SEQ ID NO: 35091 - DNA, 19 bp, synthetic construct
  source 1..19: mol_type = other DNA
tctgcctagagggggattt

SEQ ID NO: 35092 - DNA, 19 bp, synthetic construct
  source 1..19: mol_type = other DNA
ctctgcctagagggggatt

SEQ ID NO: 35093 - DNA, 19 bp, synthetic construct
  source 1..19: mol_type = other DNA
actctgcctagagggggat

SEQ ID NO: 35094 - DNA, 19 bp, synthetic construct
  source 1..19: mol_type = other DNA
tactctgcctagaggggga

SEQ ID NO: 35095 - DNA, 19 bp, synthetic construct
  source 1..19: mol_type = other DNA
atactctgcctagaggggg

SEQ ID NO: 35096 - DNA, 19 bp, synthetic construct
  source 1..19: mol_type = other DNA
tatactctgcctagagggg

SEQ ID NO: 35097 - DNA, 19 bp, synthetic construct
  source 1..19: mol_type = other DNA
ctatactctgcctagaggg

SEQ ID NO: 35098 - DNA, 19 bp, synthetic construct
  source 1..19: mol_type = other DNA
tctatactctgcctagagg

SEQ ID NO: 35099 - DNA, 19 bp, synthetic construct
  source 1..19: mol_type = other DNA
ctctatactctgcctagag

SEQ ID NO: 35100 - DNA, 19 bp, synthetic construct
  source 1..19: mol_type = other DNA
tctctatactctgcctaga

SEQ ID NO: 35101 - DNA, 19 bp, synthetic construct
  source 1..19: mol_type = other DNA
ttctctatactctgcctag

SEQ ID NO: 35102 - DNA, 19 bp, synthetic construct
  source 1..19: mol_type = other DNA
cttctctatactctgccta

SEQ ID NO: 35103 - DNA, 19 bp, synthetic construct
  source 1..19: mol_type = other DNA
tcttctctatactctgcct

SEQ ID NO: 35104 - DNA, 19 bp, synthetic construct
  source 1..19: mol_type = other DNA
ctcttctctatactctgcc

SEQ ID NO: 35105 - DNA, 19 bp, synthetic construct
  source 1..19: mol_type = other DNA
actcttctctatactctgc

SEQ ID NO: 35106 - DNA, 19 bp, synthetic construct
  source 1..19: mol_type = other DNA
gactcttctctatactctg

SEQ ID NO: 35107 - DNA, 19 bp, synthetic construct
  source 1..19: mol_type = other DNA
ggactcttctctatactct

SEQ ID NO: 35108 - DNA, 19 bp, synthetic construct
  source 1..19: mol_type = other DNA
gggactcttctctatactc

SEQ ID NO: 35109 - DNA, 19 bp, synthetic construct
  source 1..19: mol_type = other DNA
tgggactcttctctatact

SEQ ID NO: 35110 - DNA, 19 bp, synthetic construct
  source 1..19: mol_type = other DNA
atgggactcttctctatac

SEQ ID NO: 35111 - DNA, 19 bp, synthetic construct
  source 1..19: mol_type = other DNA
gatgggactcttctctata

SEQ ID NO: 35112 - DNA, 19 bp, synthetic construct
  source 1..19: mol_type = other DNA
tgatgggactcttctctat

SEQ ID NO: 35113 - DNA, 19 bp, synthetic construct
  source 1..19: mol_type = other DNA
gtgatgggactcttctcta

SEQ ID NO: 35114 - DNA, 19 bp, synthetic construct
  source 1..19: mol_type = other DNA
ggtgatgggactcttctct

SEQ ID NO: 35115 - DNA, 19 bp, synthetic construct
  source 1..19: mol_type = other DNA
aggtgatgggactcttctc

SEQ ID NO: 35116 - DNA, 19 bp, synthetic construct
  source 1..19: mol_type = other DNA
caggtgatgggactcttct

SEQ ID NO: 35117 - DNA, 19 bp, synthetic construct
  source 1..19: mol_type = other DNA
ccaggtgatgggactcttc

SEQ ID NO: 35118 - DNA, 19 bp, synthetic construct
  source 1..19: mol_type = other DNA
cccaggtgatgggactctt

SEQ ID NO: 35119 - DNA, 19 bp, synthetic construct
  source 1..19: mol_type = other DNA
acccaggtgatgggactct

SEQ ID NO: 35120 - DNA, 19 bp, synthetic construct
  source 1..19: mol_type = other DNA
cacccaggtgatgggactc

SEQ ID NO: 35121 - DNA, 19 bp, synthetic construct
  source 1..19: mol_type = other DNA
tcacccaggtgatgggact

SEQ ID NO: 35122 - DNA, 19 bp, synthetic construct
  source 1..19: mol_type = other DNA
atcacccaggtgatgggac

SEQ ID NO: 35123 - DNA, 19 bp, synthetic construct
  source 1..19: mol_type = other DNA
gatcacccaggtgatggga

SEQ ID NO: 35124 - DNA, 19 bp, synthetic construct
  source 1..19: mol_type = other DNA
tgatcacccaggtgatggg

SEQ ID NO: 35125 - DNA, 19 bp, synthetic construct
  source 1..19: mol_type = other DNA
aatatctctgcactgatca

SEQ ID NO: 35126 - DNA, 19 bp, synthetic construct
  source 1..19: mol_type = other DNA
aaatatctctgcactgatc

SEQ ID NO: 35127 - DNA, 19 bp, synthetic construct
  source 1..19: mol_type = other DNA
gaaatatctctgcactgat

SEQ ID NO: 35128 - DNA, 19 bp, synthetic construct
  source 1..19: mol_type = other DNA
tgaaatatctctgcactga

SEQ ID NO: 35129 - DNA, 19 bp, synthetic construct
  source 1..19: mol_type = other DNA
gtgaaatatctctgcactg

SEQ ID NO: 35130 - DNA, 19 bp, synthetic construct
  source 1..19: mol_type = other DNA
tgtgaaatatctctgcact

SEQ ID NO: 35131 - DNA, 19 bp, synthetic construct
  source 1..19: mol_type = other DNA
ttgtgaaatatctctgcac

SEQ ID NO: 35132 - DNA, 19 bp, synthetic construct
  source 1..19: mol_type = other DNA
cattgtgaaatatctctgc

SEQ ID NO: 35133 - DNA, 19 bp, synthetic construct
  source 1..19: mol_type = other DNA
ggggacattgtgaaatatc

SEQ ID NO: 35134 - DNA, 19 bp, synthetic construct
  source 1..19: mol_type = other DNA
caggggacattgtgaaata

SEQ ID NO: 35135 - DNA, 19 bp, synthetic construct
  source 1..19: mol_type = other DNA
acaggggacattgtgaaat

SEQ ID NO: 35136 - DNA, 19 bp, synthetic construct
  source 1..19: mol_type = other DNA
tacaggggacattgtgaaa

SEQ ID NO: 35137 - DNA, 19 bp, synthetic construct
  source 1..19: mol_type = other DNA
ctacaggggacattgtgaa

SEQ ID NO: 35138 - DNA, 19 bp, synthetic construct
  source 1..19: mol_type = other DNA
cctacaggggacattgtga

SEQ ID NO: 35139 - DNA, 19 bp, synthetic construct
  source 1..19: mol_type = other DNA
gcctacaggggacattgtg

SEQ ID NO: 35140 - DNA, 19 bp, synthetic construct
  source 1..19: mol_type = other DNA
tgcctacaggggacattgt

SEQ ID NO: 35141 - DNA, 19 bp, synthetic construct
  source 1..19: mol_type = other DNA
ctgcctacaggggacattg

SEQ ID NO: 35142 - DNA, 19 bp, synthetic construct
  source 1..19: mol_type = other DNA
tctgcctacaggggacatt

SEQ ID NO: 35143 - DNA, 19 bp, synthetic construct
  source 1..19: mol_type = other DNA
ctctgcctacaggggacat

SEQ ID NO: 35144 - DNA, 19 bp, synthetic construct
  source 1..19: mol_type = other DNA
tctctgcctacaggggaca

SEQ ID NO: 35145 - DNA, 19 bp, synthetic construct
  source 1..19: mol_type = other DNA
ctctctgcctacaggggac

SEQ ID NO: 35146 - DNA, 19 bp, synthetic construct
  source 1..19: mol_type = other DNA
actctctgcctacagggga

SEQ ID NO: 35147 - DNA, 19 bp, synthetic construct
  source 1..19: mol_type = other DNA
cactctctgcctacagggg

SEQ ID NO: 35148 - DNA, 19 bp, synthetic construct
  source 1..19: mol_type = other DNA
ccactctctgcctacaggg

SEQ ID NO: 35149 - DNA, 19 bp, synthetic construct
  source 1..19: mol_type = other DNA
tccactctctgcctacagg

SEQ ID NO: 35150 - DNA, 19 bp, synthetic construct
  source 1..19: mol_type = other DNA
gtccactctctgcctacag

SEQ ID NO: 35151 - DNA, 19 bp, synthetic construct
  source 1..19: mol_type = other DNA
tgtccactctctgcctaca

SEQ ID NO: 35152 - DNA, 19 bp, synthetic construct
  source 1..19: mol_type = other DNA
ttgtccactctctgcctac

SEQ ID NO: 35153 - DNA, 19 bp, synthetic construct
  source 1..19: mol_type = other DNA
cttgtccactctctgccta

SEQ ID NO: 35154 - DNA, 19 bp, synthetic construct
  source 1..19: mol_type = other DNA
actcttgtccactctctgc

SEQ ID NO: 35155 - DNA, 19 bp, synthetic construct
  source 1..19: mol_type = other DNA
aactcttgtccactctctg

SEQ ID NO: 35156 - DNA, 19 bp, synthetic construct
  source 1..19: mol_type = other DNA
taactcttgtccactctct

SEQ ID NO: 35157 - DNA, 19 bp, synthetic construct
  source 1..19: mol_type = other DNA
gtaactcttgtccactctc

SEQ ID NO: 35158 - DNA, 19 bp, synthetic construct
  source 1..19: mol_type = other DNA
tgtaactcttgtccactct

SEQ ID NO: 35159 - DNA, 19 bp, synthetic construct
  source 1..19: mol_type = other DNA
atgtaactcttgtccactc

SEQ ID NO: 35160 - DNA, 19 bp, synthetic construct
  source 1..19: mol_type = other DNA
gatgtaactcttgtccact

SEQ ID NO: 35161 - DNA, 19 bp, synthetic construct
  source 1..19: mol_type = other DNA
tgatgtaactcttgtccac

SEQ ID NO: 35162 - DNA, 19 bp, synthetic construct
  source 1..19: mol_type = other DNA
gtgatgtaactcttgtcca

SEQ ID NO: 35163 - DNA, 19 bp, synthetic construct
  source 1..19: mol_type = other DNA
ggtgatgtaactcttgtcc

SEQ ID NO: 35164 - DNA, 19 bp, synthetic construct
  source 1..19: mol_type = other DNA
aggtgatgtaactcttgtc

SEQ ID NO: 35165 - DNA, 19 bp, synthetic construct
  source 1..19: mol_type = other DNA
taggtgatgtaactcttgt

SEQ ID NO: 35166 - DNA, 19 bp, synthetic construct
  source 1..19: mol_type = other DNA
ctaggtgatgtaactcttg

SEQ ID NO: 35167 - DNA, 19 bp, synthetic construct
  source 1..19: mol_type = other DNA
tctaggtgatgtaactctt

SEQ ID NO: 35168 - DNA, 19 bp, synthetic construct
  source 1..19: mol_type = other DNA
atctaggtgatgtaactct

SEQ ID NO: 35169 - DNA, 19 bp, synthetic construct
  source 1..19: mol_type = other DNA
catctaggtgatgtaactc

SEQ ID NO: 35170 - DNA, 19 bp, synthetic construct
  source 1..19: mol_type = other DNA
tcatctaggtgatgtaact

SEQ ID NO: 35171 - DNA, 19 bp, synthetic construct
  source 1..19: mol_type = other DNA
atcatctaggtgatgtaac

SEQ ID NO: 35172 - DNA, 19 bp, synthetic construct
  source 1..19: mol_type = other DNA
gatcatctaggtgatgtaa

SEQ ID NO: 35173 - DNA, 19 bp, synthetic construct
  source 1..19: mol_type = other DNA
agatcatctaggtgatgta

SEQ ID NO: 35174 - DNA, 19 bp, synthetic construct
  source 1..19: mol_type = other DNA
cagatcatctaggtgatgt

SEQ ID NO: 35175 - DNA, 19 bp, synthetic construct
  source 1..19: mol_type = other DNA
acagatcatctaggtgatg

SEQ ID NO: 35176 - DNA, 19 bp, synthetic construct
  source 1..19: mol_type = other DNA
cacagatcatctaggtgat

SEQ ID NO: 35177 - DNA, 19 bp, synthetic construct
  source 1..19: mol_type = other DNA
gcacagatcatctaggtga

SEQ ID NO: 35178 - DNA, 19 bp, synthetic construct
  source 1..19: mol_type = other DNA
tgcacagatcatctaggtg

SEQ ID NO: 35179 - DNA, 19 bp, synthetic construct
  source 1..19: mol_type = other DNA
ctgcacagatcatctaggt

SEQ ID NO: 35180 - DNA, 19 bp, synthetic construct
  source 1..19: mol_type = other DNA
tctgcacagatcatctagg

SEQ ID NO: 35181 - DNA, 19 bp, synthetic construct
  source 1..19: mol_type = other DNA
ctctgcacagatcatctag

SEQ ID NO: 35182 - DNA, 19 bp, synthetic construct
  source 1..19: mol_type = other DNA
gctctgcacagatcatcta

SEQ ID NO: 35183 - DNA, 19 bp, synthetic construct
  source 1..19: mol_type = other DNA
agctctgcacagatcatct

SEQ ID NO: 35184 - DNA, 19 bp, synthetic construct
  source 1..19: mol_type = other DNA
tagctctgcacagatcatc

SEQ ID NO: 35185 - DNA, 19 bp, synthetic construct
  source 1..19: mol_type = other DNA
atagctctgcacagatcat

SEQ ID NO: 35186 - DNA, 19 bp, synthetic construct
  source 1..19: mol_type = other DNA
catagctctgcacagatca

SEQ ID NO: 35187 - DNA, 19 bp, synthetic construct
  source 1..19: mol_type = other DNA
acatagctctgcacagatc

SEQ ID NO: 35188 - DNA, 19 bp, synthetic construct
  source 1..19: mol_type = other DNA
gacatagctctgcacagat

SEQ ID NO: 35189 - DNA, 19 bp, synthetic construct
  source 1..19: mol_type = other DNA
tgacatagctctgcacaga

SEQ ID NO: 35190 - DNA, 19 bp, synthetic construct
  source 1..19: mol_type = other DNA
ttgacatagctctgcacag

SEQ ID NO: 35191 - DNA, 19 bp, synthetic construct
  source 1..19: mol_type = other DNA
tttgacatagctctgcaca

SEQ ID NO: 35192 - DNA, 19 bp, synthetic construct
  source 1..19: mol_type = other DNA
ttttgacatagctctgcac

SEQ ID NO: 35193 - DNA, 19 bp, synthetic construct
  source 1..19: mol_type = other DNA
gttttgacatagctctgca

SEQ ID NO: 35194 - DNA, 19 bp, synthetic construct
  source 1..19: mol_type = other DNA
cgttttgacatagctctgc

SEQ ID NO: 35195 - DNA, 19 bp, synthetic construct
  source 1..19: mol_type = other DNA
gcgttttgacatagctctg

SEQ ID NO: 35196 - DNA, 19 bp, synthetic construct
  source 1..19: mol_type = other DNA
ggcgttttgacatagctct

SEQ ID NO: 35197 - DNA, 19 bp, synthetic construct
  source 1..19: mol_type = other DNA
gggcgttttgacatagctc

SEQ ID NO: 35198 - DNA, 19 bp, synthetic construct
  source 1..19: mol_type = other DNA
ggggcgttttgacatagct

SEQ ID NO: 35199 - DNA, 19 bp, synthetic construct
  source 1..19: mol_type = other DNA
aggggcgttttgacatagc

SEQ ID NO: 35200 - DNA, 19 bp, synthetic construct
  source 1..19: mol_type = other DNA
caggggcgttttgacatag

SEQ ID NO: 35201 - DNA, 19 bp, synthetic construct
  source 1..19: mol_type = other DNA
acaggggcgttttgacata

SEQ ID NO: 35202 - DNA, 19 bp, synthetic construct
  source 1..19: mol_type = other DNA
tacaggggcgttttgacat

SEQ ID NO: 35203 - DNA, 19 bp, synthetic construct
  source 1..19: mol_type = other DNA
ctacaggggcgttttgaca

SEQ ID NO: 35204 - DNA, 19 bp, synthetic construct
  source 1..19: mol_type = other DNA
cctacaggggcgttttgac

SEQ ID NO: 35205 - DNA, 19 bp, synthetic construct
  source 1..19: mol_type = other DNA
gcctacaggggcgttttga

SEQ ID NO: 35206 - DNA, 19 bp, synthetic construct
  source 1..19: mol_type = other DNA
tgcctacaggggcgttttg

SEQ ID NO: 35207 - DNA, 19 bp, synthetic construct
  source 1..19: mol_type = other DNA
ctgcctacaggggcgtttt

SEQ ID NO: 35208 - DNA, 19 bp, synthetic construct
  source 1..19: mol_type = other DNA
tctgcctacaggggcgttt

SEQ ID NO: 35209 - DNA, 19 bp, synthetic construct
  source 1..19: mol_type = other DNA
atctaggctctgcctacag

SEQ ID NO: 35210 - DNA, 19 bp, synthetic construct
  source 1..19: mol_type = other DNA
catctaggctctgcctaca

SEQ ID NO: 35211 - DNA, 19 bp, synthetic construct
  source 1..19: mol_type = other DNA
tcatctaggctctgcctac

SEQ ID NO: 35212 - DNA, 19 bp, synthetic construct
  source 1..19: mol_type = other DNA
ctcatctaggctctgccta

SEQ ID NO: 35213 - DNA, 19 bp, synthetic construct
  source 1..19: mol_type = other DNA
actcatctaggctctgcct

SEQ ID NO: 35214 - DNA, 19 bp, synthetic construct
  source 1..19: mol_type = other DNA
cactcatctaggctctgcc

SEQ ID NO: 35215 - DNA, 19 bp, synthetic construct
  source 1..19: mol_type = other DNA
acactcatctaggctctgc

SEQ ID NO: 35216 - DNA, 19 bp, synthetic construct
  source 1..19: mol_type = other DNA
aacactcatctaggctctg

SEQ ID NO: 35217 - DNA, 19 bp, synthetic construct
  source 1..19: mol_type = other DNA
taacactcatctaggctct

SEQ ID NO: 35218 - DNA, 19 bp, synthetic construct
  source 1..19: mol_type = other DNA
gtaacactcatctaggctc

SEQ ID NO: 35219 - DNA, 19 bp, synthetic construct
  source 1..19: mol_type = other DNA
tgtaacactcatctaggct

SEQ ID NO: 35220 - DNA, 19 bp, synthetic construct
  source 1..19: mol_type = other DNA
atgtaacactcatctaggc

SEQ ID NO: 35221 - DNA, 19 bp, synthetic construct
  source 1..19: mol_type = other DNA
gatgtaacactcatctagg

SEQ ID NO: 35222 - DNA, 19 bp, synthetic construct
  source 1..19: mol_type = other DNA
gtgatgtaacactcatcta

SEQ ID NO: 35223 - DNA, 19 bp, synthetic construct
  source 1..19: mol_type = other DNA
ggtgatgtaacactcatct

SEQ ID NO: 35224 - DNA, 19 bp, synthetic construct
  source 1..19: mol_type = other DNA
aggtgatgtaacactcatc

SEQ ID NO: 35225 - DNA, 19 bp, synthetic construct
  source 1..19: mol_type = other DNA
caggtgatgtaacactcat

SEQ ID NO: 35226 - DNA, 19 bp, synthetic construct
  source 1..19: mol_type = other DNA
ccaggtgatgtaacactca

SEQ ID NO: 35227 - DNA, 19 bp, synthetic construct
  source 1..19: mol_type = other DNA
cccaggtgatgtaacactc

SEQ ID NO: 35228 - DNA, 19 bp, synthetic construct
  source 1..19: mol_type = other DNA
atgatcacccaggtgatgt

SEQ ID NO: 35229 - DNA, 19 bp, synthetic construct
  source 1..19: mol_type = other DNA
aatgatcacccaggtgatg

SEQ ID NO: 35230 - DNA, 19 bp, synthetic construct
  source 1..19: mol_type = other DNA
caatgatcacccaggtgat

SEQ ID NO: 35231 - DNA, 19 bp, synthetic construct
  source 1..19: mol_type = other DNA
gcaatgatcacccaggtga

SEQ ID NO: 35232 - DNA, 19 bp, synthetic construct
  source 1..19: mol_type = other DNA
tgcaatgatcacccaggtg

SEQ ID NO: 35233 - DNA, 19 bp, synthetic construct
  source 1..19: mol_type = other DNA
ctgcaatgatcacccaggt

SEQ ID NO: 35234 - DNA, 19 bp, synthetic construct
  source 1..19: mol_type = other DNA
tctgcaatgatcacccagg

SEQ ID NO: 35235 - DNA, 19 bp, synthetic construct
  source 1..19: mol_type = other DNA
ctctgcaatgatcacccag

SEQ ID NO: 35236 - DNA, 19 bp, synthetic construct
  source 1..19: mol_type = other DNA
tctctgcaatgatcaccca

SEQ ID NO: 35237 - DNA, 19 bp, synthetic construct
  source 1..19: mol_type = other DNA
atctctgcaatgatcaccc

SEQ ID NO: 35238 - DNA, 19 bp, synthetic construct
  source 1..19: mol_type = other DNA
tatctctgcaatgatcacc

SEQ ID NO: 35239 - DNA, 19 bp, synthetic construct
  source 1..19: mol_type = other DNA
gtatctctgcaatgatcac

SEQ ID NO: 35240 - DNA, 19 bp, synthetic construct
  source 1..19: mol_type = other DNA
cgtatctctgcaatgatca

SEQ ID NO: 35241 - DNA, 19 bp, synthetic construct
  source 1..19: mol_type = other DNA
acgtatctctgcaatgatc

SEQ ID NO: 35242 - DNA, 19 bp, synthetic construct
  source 1..19: mol_type = other DNA
gacgtatctctgcaatgat

SEQ ID NO: 35243 - DNA, 19 bp, synthetic construct
  source 1..19: mol_type = other DNA
tgacgtatctctgcaatga

SEQ ID NO: 35244 - DNA, 19 bp, synthetic construct
  source 1..19: mol_type = other DNA
gtgacgtatctctgcaatg

SEQ ID NO: 35245 - DNA, 19 bp, synthetic construct
  source 1..19: mol_type = other DNA
tgtgacgtatctctgcaat

SEQ ID NO: 35246 - DNA, 19 bp, synthetic construct
  source 1..19: mol_type = other DNA
ttgtgacgtatctctgcaa

SEQ ID NO: 35247 - DNA, 19 bp, synthetic construct
  source 1..19: mol_type = other DNA
attgtgacgtatctctgca

SEQ ID NO: 35248 - DNA, 19 bp, synthetic construct
  source 1..19: mol_type = other DNA
tattgtgacgtatctctgc

SEQ ID NO: 35249 - DNA, 19 bp, synthetic construct
  source 1..19: mol_type = other DNA
gtattgtgacgtatctctg

SEQ ID NO: 35250 - DNA, 19 bp, synthetic construct
  source 1..19: mol_type = other DNA
ggtattgtgacgtatctct

SEQ ID NO: 35251 - DNA, 19 bp, synthetic construct
  source 1..19: mol_type = other DNA
gggtattgtgacgtatctc

SEQ ID NO: 35252 - DNA, 19 bp, synthetic construct
  source 1..19: mol_type = other DNA
ggggtattgtgacgtatct

SEQ ID NO: 35253 - DNA, 19 bp, synthetic construct
  source 1..19: mol_type = other DNA
gggggtattgtgacgtatc

SEQ ID NO: 35254 - DNA, 19 bp, synthetic construct
  source 1..19: mol_type = other DNA
agggggtattgtgacgtat

SEQ ID NO: 35255 - DNA, 19 bp, synthetic construct
  source 1..19: mol_type = other DNA
cagggggtattgtgacgta

SEQ ID NO: 35256 - DNA, 19 bp, synthetic construct
  source 1..19: mol_type = other DNA
acagggggtattgtgacgt

SEQ ID NO: 35257 - DNA, 19 bp, synthetic construct
  source 1..19: mol_type = other DNA
tacagggggtattgtgacg

SEQ ID NO: 35258 - DNA, 19 bp, synthetic construct
  source 1..19: mol_type = other DNA
ctacagggggtattgtgac

SEQ ID NO: 35259 - DNA, 19 bp, synthetic construct
  source 1..19: mol_type = other DNA
cctacagggggtattgtga

SEQ ID NO: 35260 - DNA, 19 bp, synthetic construct
  source 1..19: mol_type = other DNA
acctacagggggtattgtg

SEQ ID NO: 35261 - DNA, 19 bp, synthetic construct
  source 1..19: mol_type = other DNA
cacctacagggggtattgt

SEQ ID NO: 35262 - DNA, 19 bp, synthetic construct
  source 1..19: mol_type = other DNA
ccacctacagggggtattg

SEQ ID NO: 35263 - DNA, 19 bp, synthetic construct
  source 1..19: mol_type = other DNA
cccacctacagggggtatt

SEQ ID NO: 35264 - DNA, 19 bp, synthetic construct
  source 1..19: mol_type = other DNA
aactcttgtctaggcccca

SEQ ID NO: 35265 - DNA, 19 bp, synthetic construct
  source 1..19: mol_type = other DNA
taactcttgtctaggcccc

SEQ ID NO: 35266 - DNA, 19 bp, synthetic construct
  source 1..19: mol_type = other DNA
gtaactcttgtctaggccc

SEQ ID NO: 35267 - DNA, 19 bp, synthetic construct
  source 1..19: mol_type = other DNA
tgtaactcttgtctaggcc

SEQ ID NO: 35268 - DNA, 19 bp, synthetic construct
  source 1..19: mol_type = other DNA
atgtaactcttgtctaggc

SEQ ID NO: 35269 - DNA, 19 bp, synthetic construct
  source 1..19: mol_type = other DNA
gatgtaactcttgtctagg

SEQ ID NO: 35270 - DNA, 19 bp, synthetic construct
  source 1..19: mol_type = other DNA
tgatgtaactcttgtctag

SEQ ID NO: 35271 - DNA, 19 bp, synthetic construct
  source 1..19: mol_type = other DNA
gtgatgtaactcttgtcta

SEQ ID NO: 35272 - DNA, 19 bp, synthetic construct
  source 1..19: mol_type = other DNA
ggtgatgtaactcttgtct

SEQ ID NO: 35273 - DNA, 19 bp, synthetic construct
  source 1..19: mol_type = other DNA
caggtgatgtaactcttgt

SEQ ID NO: 35274 - DNA, 19 bp, synthetic construct
  source 1..19: mol_type = other DNA
ccaggtgatgtaactcttg

SEQ ID NO: 35275 - DNA, 19 bp, synthetic construct
  source 1..19: mol_type = other DNA
cccaggtgatgtaactctt

SEQ ID NO: 35276 - DNA, 19 bp, synthetic construct
  source 1..19: mol_type = other DNA
acccaggtgatgtaactct

SEQ ID NO: 35277 - DNA, 19 bp, synthetic construct
  source 1..19: mol_type = other DNA
cacccaggtgatgtaactc

SEQ ID NO: 35278 - DNA, 19 bp, synthetic construct
  source 1..19: mol_type = other DNA
tcacccaggtgatgtaact

SEQ ID NO: 35279 - DNA, 19 bp, synthetic construct
  source 1..19: mol_type = other DNA
tactgatcacccaggtgat

SEQ ID NO: 35280 - DNA, 19 bp, synthetic construct
  source 1..19: mol_type = other DNA
gtactgatcacccaggtga

SEQ ID NO: 35281 - DNA, 19 bp, synthetic construct
  source 1..19: mol_type = other DNA
tgtactgatcacccaggtg

SEQ ID NO: 35282 - DNA, 19 bp, synthetic construct
  source 1..19: mol_type = other DNA
ctgtactgatcacccaggt

SEQ ID NO: 35283 - DNA, 19 bp, synthetic construct
  source 1..19: mol_type = other DNA
tctgtactgatcacccagg

SEQ ID NO: 35284 - DNA, 19 bp, synthetic construct
  source 1..19: mol_type = other DNA
ttctgtactgatcacccag

SEQ ID NO: 35285 - DNA, 19 bp, synthetic construct
  source 1..19: mol_type = other DNA
cttctgtactgatcaccca

SEQ ID NO: 35286 - DNA, 19 bp, synthetic construct
  source 1..19: mol_type = other DNA
acttctgtactgatcaccc

SEQ ID NO: 35287 - DNA, 19 bp, synthetic construct
  source 1..19: mol_type = other DNA
tacttctgtactgatcacc

SEQ ID NO: 35288 - DNA, 19 bp, synthetic construct
  source 1..19: mol_type = other DNA
atacttctgtactgatcac

SEQ ID NO: 35289 - DNA, 19 bp, synthetic construct
  source 1..19: mol_type = other DNA
catacttctgtactgatca

SEQ ID NO: 35290 - DNA, 19 bp, synthetic construct
  source 1..19: mol_type = other DNA
acatacttctgtactgatc

SEQ ID NO: 35291 - DNA, 19 bp, synthetic construct
  source 1..19: mol_type = other DNA
gacatacttctgtactgat

SEQ ID NO: 35292 - DNA, 19 bp, synthetic construct
  source 1..19: mol_type = other DNA
tgacatacttctgtactga

SEQ ID NO: 35293 - DNA, 19 bp, synthetic construct
  source 1..19: mol_type = other DNA
gtgacatacttctgtactg

SEQ ID NO: 35294 - DNA, 19 bp, synthetic construct
  source 1..19: mol_type = other DNA
tgtgacatacttctgtact

SEQ ID NO: 35295 - DNA, 19 bp, synthetic construct
  source 1..19: mol_type = other DNA
ttgtgacatacttctgtac

SEQ ID NO: 35296 - DNA, 19 bp, synthetic construct
  source 1..19: mol_type = other DNA
tttgtgacatacttctgta

SEQ ID NO: 35297 - DNA, 19 bp, synthetic construct
  source 1..19: mol_type = other DNA
ctttgtgacatacttctgt

SEQ ID NO: 35298 - DNA, 19 bp, synthetic construct
  source 1..19: mol_type = other DNA
gctttgtgacatacttctg

SEQ ID NO: 35299 - DNA, 19 bp, synthetic construct
  source 1..19: mol_type = other DNA
ggctttgtgacatacttct

SEQ ID NO: 35300 - DNA, 19 bp, synthetic construct
  source 1..19: mol_type = other DNA
gggctttgtgacatacttc

SEQ ID NO: 35301 - DNA, 19 bp, synthetic construct
  source 1..19: mol_type = other DNA
ggggctttgtgacatactt

SEQ ID NO: 35302 - DNA, 19 bp, synthetic construct
  source 1..19: mol_type = other DNA
aggggctttgtgacatact

SEQ ID NO: 35303 - DNA, 19 bp, synthetic construct
  source 1..19: mol_type = other DNA
caggggctttgtgacatac

SEQ ID NO: 35304 - DNA, 19 bp, synthetic construct
  source 1..19: mol_type = other DNA
acaggggctttgtgacata

SEQ ID NO: 35305 - DNA, 19 bp, synthetic construct
  source 1..19: mol_type = other DNA
tacaggggctttgtgacat

SEQ ID NO: 35306 - DNA, 19 bp, synthetic construct
  source 1..19: mol_type = other DNA
tgtaactcttgtctaggct

SEQ ID NO: 35307 - DNA, 19 bp, synthetic construct
  source 1..19: mol_type = other DNA
aacccaggtgatgtaactc

SEQ ID NO: 35308 - DNA, 19 bp, synthetic construct
  source 1..19: mol_type = other DNA
taacccaggtgatgtaact

SEQ ID NO: 35309 - DNA, 19 bp, synthetic construct
  source 1..19: mol_type = other DNA
ataacccaggtgatgtaac

SEQ ID NO: 35310 - DNA, 19 bp, synthetic construct
  source 1..19: mol_type = other DNA
gataacccaggtgatgtaa

SEQ ID NO: 35311 - DNA, 19 bp, synthetic construct
  source 1..19: mol_type = other DNA
tgataacccaggtgatgta

SEQ ID NO: 35312 - DNA, 19 bp, synthetic construct
  source 1..19: mol_type = other DNA
ctgataacccaggtgatgt

SEQ ID NO: 35313 - DNA, 19 bp, synthetic construct
  source 1..19: mol_type = other DNA
actgataacccaggtgatg

SEQ ID NO: 35314 - DNA, 19 bp, synthetic construct
  source 1..19: mol_type = other DNA
cactgataacccaggtgat

SEQ ID NO: 35315 - DNA, 19 bp, synthetic construct
  source 1..19: mol_type = other DNA
gcactgataacccaggtga

SEQ ID NO: 35316 - DNA, 19 bp, synthetic construct
  source 1..19: mol_type = other DNA
tgcactgataacccaggtg

SEQ ID NO: 35317 - DNA, 19 bp, synthetic construct
  source 1..19: mol_type = other DNA
ctgcactgataacccaggt

SEQ ID NO: 35318 - DNA, 19 bp, synthetic construct
  source 1..19: mol_type = other DNA
tctgcactgataacccagg

SEQ ID NO: 35319 - DNA, 19 bp, synthetic construct
  source 1..19: mol_type = other DNA
ttctgcactgataacccag

SEQ ID NO: 35320 - DNA, 19 bp, synthetic construct
  source 1..19: mol_type = other DNA
tttctgcactgataaccca

SEQ ID NO: 35321 - DNA, 19 bp, synthetic construct
  source 1..19: mol_type = other DNA
atttctgcactgataaccc

SEQ ID NO: 35322 - DNA, 19 bp, synthetic construct
  source 1..19: mol_type = other DNA
tatttctgcactgataacc

SEQ ID NO: 35323 - DNA, 19 bp, synthetic construct
  source 1..19: mol_type = other DNA
acatatttctgcactgata

SEQ ID NO: 35324 - DNA, 19 bp, synthetic construct
  source 1..19: mol_type = other DNA
gacatatttctgcactgat

SEQ ID NO: 35325 - DNA, 19 bp, synthetic construct
  source 1..19: mol_type = other DNA
tgacatatttctgcactga

SEQ ID NO: 35326 - DNA, 19 bp, synthetic construct
  source 1..19: mol_type = other DNA
gtgacatatttctgcactg

SEQ ID NO: 35327 - DNA, 19 bp, synthetic construct
  source 1..19: mol_type = other DNA
tgtgacatatttctgcact

SEQ ID NO: 35328 - DNA, 19 bp, synthetic construct
  source 1..19: mol_type = other DNA
ttgtgacatatttctgcac

SEQ ID NO: 35329 - DNA, 19 bp, synthetic construct
  source 1..19: mol_type = other DNA
tttgtgacatatttctgca

SEQ ID NO: 35330 - DNA, 19 bp, synthetic construct
  source 1..19: mol_type = other DNA
ctttgtgacatatttctgc

SEQ ID NO: 35331 - DNA, 19 bp, synthetic construct
  source 1..19: mol_type = other DNA
gctttgtgacatatttctg

SEQ ID NO: 35332 - DNA, 19 bp, synthetic construct
  source 1..19: mol_type = other DNA
ggctttgtgacatatttct

SEQ ID NO: 35333 - DNA, 19 bp, synthetic construct
  source 1..19: mol_type = other DNA
gggctttgtgacatatttc

SEQ ID NO: 35334 - DNA, 19 bp, synthetic construct
  source 1..19: mol_type = other DNA
ggggctttgtgacatattt

SEQ ID NO: 35335 - DNA, 19 bp, synthetic construct
  source 1..19: mol_type = other DNA
aggggctttgtgacatatt

SEQ ID NO: 35336 - DNA, 19 bp, synthetic construct
  source 1..19: mol_type = other DNA
caggggctttgtgacatat

SEQ ID NO: 35337 - DNA, 19 bp, synthetic construct
  source 1..19: mol_type = other DNA
acctacaggggctttgtga

SEQ ID NO: 35338 - DNA, 19 bp, synthetic construct
  source 1..19: mol_type = other DNA
gacctacaggggctttgtg

SEQ ID NO: 35339 - DNA, 19 bp, synthetic construct
  source 1..19: mol_type = other DNA
cgacctacaggggctttgt

SEQ ID NO: 35340 - DNA, 19 bp, synthetic construct
  source 1..19: mol_type = other DNA
tcgacctacaggggctttg

SEQ ID NO: 35341 - DNA, 19 bp, synthetic construct
  source 1..19: mol_type = other DNA
ctcgacctacaggggcttt

SEQ ID NO: 35342 - DNA, 19 bp, synthetic construct
  source 1..19: mol_type = other DNA
actcgacctacaggggctt

SEQ ID NO: 35343 - DNA, 19 bp, synthetic construct
  source 1..19: mol_type = other DNA
gactcgacctacaggggct

SEQ ID NO: 35344 - DNA, 19 bp, synthetic construct
  source 1..19: mol_type = other DNA
agactcgacctacaggggc

SEQ ID NO: 35345 - DNA, 19 bp, synthetic construct
  source 1..19: mol_type = other DNA
tagactcgacctacagggg

SEQ ID NO: 35346 - DNA, 19 bp, synthetic construct
  source 1..19: mol_type = other DNA
ctagactcgacctacaggg

SEQ ID NO: 35347 - DNA, 19 bp, synthetic construct
  source 1..19: mol_type = other DNA
tctagactcgacctacagg

SEQ ID NO: 35348 - DNA, 19 bp, synthetic construct
  source 1..19: mol_type = other DNA
gtctagactcgacctacag

SEQ ID NO: 35349 - DNA, 19 bp, synthetic construct
  source 1..19: mol_type = other DNA
tgtctagactcgacctaca

SEQ ID NO: 35350 - DNA, 19 bp, synthetic construct
  source 1..19: mol_type = other DNA
ttgtctagactcgacctac

SEQ ID NO: 35351 - DNA, 19 bp, synthetic construct
  source 1..19: mol_type = other DNA
cttgtctagactcgaccta

SEQ ID NO: 35352 - DNA, 19 bp, synthetic construct
  source 1..19: mol_type = other DNA
tcttgtctagactcgacct

SEQ ID NO: 35353 - DNA, 19 bp, synthetic construct
  source 1..19: mol_type = other DNA
ctcttgtctagactcgacc

SEQ ID NO: 35354 - DNA, 19 bp, synthetic construct
  source 1..19: mol_type = other DNA
actcttgtctagactcgac

SEQ ID NO: 35355 - DNA, 19 bp, synthetic construct
  source 1..19: mol_type = other DNA
aactcttgtctagactcga

SEQ ID NO: 35356 - DNA, 19 bp, synthetic construct
  source 1..19: mol_type = other DNA
taactcttgtctagactcg

SEQ ID NO: 35357 - DNA, 19 bp, synthetic construct
  source 1..19: mol_type = other DNA
gtaactcttgtctagactc

SEQ ID NO: 35358 - DNA, 19 bp, synthetic construct
  source 1..19: mol_type = other DNA
tgtaactcttgtctagact

SEQ ID NO: 35359 - DNA, 19 bp, synthetic construct
  source 1..19: mol_type = other DNA
atgtaactcttgtctagac

SEQ ID NO: 35360 - DNA, 19 bp, synthetic construct
  source 1..19: mol_type = other DNA
gatgtaactcttgtctaga

SEQ ID NO: 35361 - DNA, 19 bp, synthetic construct
  source 1..19: mol_type = other DNA
agatgtaactcttgtctag

SEQ ID NO: 35362 - DNA, 19 bp, synthetic construct
  source 1..19: mol_type = other DNA
gagatgtaactcttgtcta

SEQ ID NO: 35363 - DNA, 19 bp, synthetic construct
  source 1..19: mol_type = other DNA
ggagatgtaactcttgtct

SEQ ID NO: 35364 - DNA, 19 bp, synthetic construct
  source 1..19: mol_type = other DNA
aggagatgtaactcttgtc

SEQ ID NO: 35365 - DNA, 19 bp, synthetic construct
  source 1..19: mol_type = other DNA
caggagatgtaactcttgt

SEQ ID NO: 35366 - DNA, 19 bp, synthetic construct
  source 1..19: mol_type = other DNA
ccaggagatgtaactcttg

SEQ ID NO: 35367 - DNA, 19 bp, synthetic construct
  source 1..19: mol_type = other DNA
cccaggagatgtaactctt

SEQ ID NO: 35368 - DNA, 19 bp, synthetic construct
  source 1..19: mol_type = other DNA
acccaggagatgtaactct

SEQ ID NO: 35369 - DNA, 19 bp, synthetic construct
  source 1..19: mol_type = other DNA
cacccaggagatgtaactc

SEQ ID NO: 35370 - DNA, 19 bp, synthetic construct
  source 1..19: mol_type = other DNA
tcacccaggagatgtaact

SEQ ID NO: 35371 - DNA, 19 bp, synthetic construct
  source 1..19: mol_type = other DNA
atcacccaggagatgtaac

SEQ ID NO: 35372 - DNA, 19 bp, synthetic construct
  source 1..19: mol_type = other DNA
gatcacccaggagatgtaa

SEQ ID NO: 35373 - DNA, 19 bp, synthetic construct
  source 1..19: mol_type = other DNA
tgatcacccaggagatgta

SEQ ID NO: 35374 - DNA, 19 bp, synthetic construct
  source 1..19: mol_type = other DNA
ctgatcacccaggagatgt

SEQ ID NO: 35375 - DNA, 19 bp, synthetic construct
  source 1..19: mol_type = other DNA
actgatcacccaggagatg

SEQ ID NO: 35376 - DNA, 19 bp, synthetic construct
  source 1..19: mol_type = other DNA
cactgatcacccaggagat

SEQ ID NO: 35377 - DNA, 19 bp, synthetic construct
  source 1..19: mol_type = other DNA
gcactgatcacccaggaga

SEQ ID NO: 35378 - DNA, 19 bp, synthetic construct
  source 1..19: mol_type = other DNA
tgcactgatcacccaggag

SEQ ID NO: 35379 - DNA, 19 bp, synthetic construct
  source 1..19: mol_type = other DNA
ttgcactgatcacccagga

SEQ ID NO: 35380 - DNA, 19 bp, synthetic construct
  source 1..19: mol_type = other DNA
tttgcactgatcacccagg

SEQ ID NO: 35381 - DNA, 19 bp, synthetic construct
  source 1..19: mol_type = other DNA
ctttgcactgatcacccag

SEQ ID NO: 35382 - DNA, 19 bp, synthetic construct
  source 1..19: mol_type = other DNA
tctttgcactgatcaccca

SEQ ID NO: 35383 - DNA, 19 bp, synthetic construct
  source 1..19: mol_type = other DNA
atctttgcactgatcaccc

SEQ ID NO: 35384 - DNA, 19 bp, synthetic construct
  source 1..19: mol_type = other DNA
tatctttgcactgatcacc

SEQ ID NO: 35385 - DNA, 19 bp, synthetic construct
  source 1..19: mol_type = other DNA
atatctttgcactgatcac

SEQ ID NO: 35386 - DNA, 19 bp, synthetic construct
  source 1..19: mol_type = other DNA
catatctttgcactgatca

SEQ ID NO: 35387 - DNA, 19 bp, synthetic construct
  source 1..19: mol_type = other DNA
acatatctttgcactgatc

SEQ ID NO: 35388 - DNA, 19 bp, synthetic construct
  source 1..19: mol_type = other DNA
gacatatctttgcactgat

SEQ ID NO: 35389 - DNA, 19 bp, synthetic construct
  source 1..19: mol_type = other DNA
tgacatatctttgcactga

SEQ ID NO: 35390 - DNA, 19 bp, synthetic construct
  source 1..19: mol_type = other DNA
gtgacatatctttgcactg

SEQ ID NO: 35391 - DNA, 19 bp, synthetic construct
  source 1..19: mol_type = other DNA
tgtgacatatctttgcact

SEQ ID NO: 35392 - DNA, 19 bp, synthetic construct
  source 1..19: mol_type = other DNA
ttgtgacatatctttgcac

SEQ ID NO: 35393 - DNA, 19 bp, synthetic construct
  source 1..19: mol_type = other DNA
tttgtgacatatctttgca

SEQ ID NO: 35394 - DNA, 19 bp, synthetic construct
  source 1..19: mol_type = other DNA
ctttgtgacatatctttgc

SEQ ID NO: 35395 - DNA, 19 bp, synthetic construct
  source 1..19: mol_type = other DNA
gctttgtgacatatctttg

SEQ ID NO: 35396 - DNA, 19 bp, synthetic construct
  source 1..19: mol_type = other DNA
ggctttgtgacatatcttt

SEQ ID NO: 35397 - DNA, 19 bp, synthetic construct
  source 1..19: mol_type = other DNA
gggctttgtgacatatctt

SEQ ID NO: 35398 - DNA, 19 bp, synthetic construct
  source 1..19: mol_type = other DNA
ggggctttgtgacatatct

SEQ ID NO: 35399 - DNA, 19 bp, synthetic construct
  source 1..19: mol_type = other DNA
gggggctttgtgacatatc

SEQ ID NO: 35400 - DNA, 19 bp, synthetic construct
  source 1..19: mol_type = other DNA
agggggctttgtgacatat

SEQ ID NO: 35401 - DNA, 19 bp, synthetic construct
  source 1..19: mol_type = other DNA
cagggggctttgtgacata

SEQ ID NO: 35402 - DNA, 19 bp, synthetic construct
  source 1..19: mol_type = other DNA
acagggggctttgtgacat

SEQ ID NO: 35403 - DNA, 19 bp, synthetic construct
  source 1..19: mol_type = other DNA
tacagggggctttgtgaca

SEQ ID NO: 35404 - DNA, 19 bp, synthetic construct
  source 1..19: mol_type = other DNA
ctacagggggctttgtgac

SEQ ID NO: 35405 - DNA, 19 bp, synthetic construct
  source 1..19: mol_type = other DNA
atttgtctacagggggctt

SEQ ID NO: 35406 - DNA, 19 bp, synthetic construct
  source 1..19: mol_type = other DNA
gatttgtctacagggggct

SEQ ID NO: 35407 - DNA, 19 bp, synthetic construct
  source 1..19: mol_type = other DNA
ggatttgtctacagggggc

SEQ ID NO: 35408 - DNA, 19 bp, synthetic construct
  source 1..19: mol_type = other DNA
gggatttgtctacaggggg

SEQ ID NO: 35409 - DNA, 19 bp, synthetic construct
  source 1..19: mol_type = other DNA
tgggatttgtctacagggg

SEQ ID NO: 35410 - DNA, 19 bp, synthetic construct
  source 1..19: mol_type = other DNA
ctgggatttgtctacaggg

SEQ ID NO: 35411 - DNA, 19 bp, synthetic construct
  source 1..19: mol_type = other DNA
tctgggatttgtctacagg

SEQ ID NO: 35412 - DNA, 19 bp, synthetic construct
  source 1..19: mol_type = other DNA
ttctgggatttgtctacag

SEQ ID NO: 35413 - DNA, 19 bp, synthetic construct
  source 1..19: mol_type = other DNA
tttctgggatttgtctaca

SEQ ID NO: 35414 - DNA, 19 bp, synthetic construct
  source 1..19: mol_type = other DNA
ttttctgggatttgtctac

SEQ ID NO: 35415 - DNA, 19 bp, synthetic construct
  source 1..19: mol_type = other DNA
attttctgggatttgtcta

SEQ ID NO: 35416 - DNA, 19 bp, synthetic construct
  source 1..19: mol_type = other DNA
aattttctgggatttgtct

SEQ ID NO: 35417 - DNA, 19 bp, synthetic construct
  source 1..19: mol_type = other DNA
caattttctgggatttgtc

SEQ ID NO: 35418 - DNA, 19 bp, synthetic construct
  source 1..19: mol_type = other DNA
acaattttctgggatttgt

SEQ ID NO: 35419 - DNA, 19 bp, synthetic construct
  source 1..19: mol_type = other DNA
ccaggtgatgtaacaattt

SEQ ID NO: 35420 - DNA, 19 bp, synthetic construct
  source 1..19: mol_type = other DNA
cccaggtgatgtaacaatt

SEQ ID NO: 35421 - DNA, 19 bp, synthetic construct
  source 1..19: mol_type = other DNA
acccaggtgatgtaacaat

SEQ ID NO: 35422 - DNA, 19 bp, synthetic construct
  source 1..19: mol_type = other DNA
cacccaggtgatgtaacaa

SEQ ID NO: 35423 - DNA, 19 bp, synthetic construct
  source 1..19: mol_type = other DNA
ccactgatcacccaggtga

SEQ ID NO: 35424 - DNA, 19 bp, synthetic construct
  source 1..19: mol_type = other DNA
tccactgatcacccaggtg

SEQ ID NO: 35425 - DNA, 19 bp, synthetic construct
  source 1..19: mol_type = other DNA
ctccactgatcacccaggt

SEQ ID NO: 35426 - DNA, 19 bp, synthetic construct
  source 1..19: mol_type = other DNA
tctccactgatcacccagg

SEQ ID NO: 35427 - DNA, 19 bp, synthetic construct
  source 1..19: mol_type = other DNA
atctccactgatcacccag

SEQ ID NO: 35428 - DNA, 19 bp, synthetic construct
  source 1..19: mol_type = other DNA
tatctccactgatcaccca

SEQ ID NO: 35429 - DNA, 19 bp, synthetic construct
  source 1..19: mol_type = other DNA
atatctccactgatcaccc

SEQ ID NO: 35430 - DNA, 19 bp, synthetic construct
  source 1..19: mol_type = other DNA
catatctccactgatcacc

SEQ ID NO: 35431 - DNA, 19 bp, synthetic construct
  source 1..19: mol_type = other DNA
acatatctccactgatcac

SEQ ID NO: 35432 - DNA, 19 bp, synthetic construct
  source 1..19: mol_type = other DNA
cacatatctccactgatca

SEQ ID NO: 35433 - DNA, 19 bp, synthetic construct
  source 1..19: mol_type = other DNA
acacatatctccactgatc

SEQ ID NO: 35434 - DNA, 19 bp, synthetic construct
  source 1..19: mol_type = other DNA
gacacatatctccactgat

SEQ ID NO: 35435 - DNA, 19 bp, synthetic construct
  source 1..19: mol_type = other DNA
tgacacatatctccactga

SEQ ID NO: 35436 - DNA, 19 bp, synthetic construct
  source 1..19: mol_type = other DNA
gtgacacatatctccactg

SEQ ID NO: 35437 - DNA, 19 bp, synthetic construct
  source 1..19: mol_type = other DNA
tgtgacacatatctccact

SEQ ID NO: 35438 - DNA, 19 bp, synthetic construct
  source 1..19: mol_type = other DNA
ttgtgacacatatctccac

SEQ ID NO: 35439 - DNA, 19 bp, synthetic construct
  source 1..19: mol_type = other DNA
attgtgacacatatctcca

SEQ ID NO: 35440 - DNA, 19 bp, synthetic construct
  source 1..19: mol_type = other DNA
aattgtgacacatatctcc

SEQ ID NO: 35441 - DNA, 19 bp, synthetic construct
  source 1..19: mol_type = other DNA
ggaattgtgacacatatct

SEQ ID NO: 35442 - DNA, 19 bp, synthetic construct
  source 1..19: mol_type = other DNA
gggaattgtgacacatatc

SEQ ID NO: 35443 - DNA, 19 bp, synthetic construct
  source 1..19: mol_type = other DNA
ggggaattgtgacacatat

SEQ ID NO: 35444 - DNA, 19 bp, synthetic construct
  source 1..19: mol_type = other DNA
aggggaattgtgacacata

SEQ ID NO: 35445 - DNA, 19 bp, synthetic construct
  source 1..19: mol_type = other DNA
aaggggaattgtgacacat

SEQ ID NO: 35446 - DNA, 19 bp, synthetic construct
  source 1..19: mol_type = other DNA
aaaggggaattgtgacaca

SEQ ID NO: 35447 - DNA, 19 bp, synthetic construct
  source 1..19: mol_type = other DNA
cctaaaggggaattgtgac

SEQ ID NO: 35448 - DNA, 19 bp, synthetic construct
  source 1..19: mol_type = other DNA
gcctaaaggggaattgtga

SEQ ID NO: 35449 - DNA, 19 bp, synthetic construct
  source 1..19: mol_type = other DNA
tgcctaaaggggaattgtg

SEQ ID NO: 35450 - DNA, 19 bp, synthetic construct
  source 1..19: mol_type = other DNA
gtgcctaaaggggaattgt

SEQ ID NO: 35451 - DNA, 19 bp, synthetic construct
  source 1..19: mol_type = other DNA
tgtgcctaaaggggaattg

SEQ ID NO: 35452 - DNA, 19 bp, synthetic construct
  source 1..19: mol_type = other DNA
ctgtgcctaaaggggaatt

SEQ ID NO: 35453 - DNA, 19 bp, synthetic construct
  source 1..19: mol_type = other DNA
gctgtgcctaaaggggaat

SEQ ID NO: 35454 - DNA, 19 bp, synthetic construct
  source 1..19: mol_type = other DNA
agctgtgcctaaaggggaa

SEQ ID NO: 35455 - DNA, 19 bp, synthetic construct
  source 1..19: mol_type = other DNA
aagctgtgcctaaagggga

SEQ ID NO: 35456 - DNA, 19 bp, synthetic construct
  source 1..19: mol_type = other DNA
taagctgtgcctaaagggg

SEQ ID NO: 35457 - DNA, 19 bp, synthetic construct
  source 1..19: mol_type = other DNA
ctaagctgtgcctaaaggg

SEQ ID NO: 35458 - DNA, 19 bp, synthetic construct
  source 1..19: mol_type = other DNA
tctaagctgtgcctaaagg

SEQ ID NO: 35459 - DNA, 19 bp, synthetic construct
  source 1..19: mol_type = other DNA
gtctaagctgtgcctaaag

SEQ ID NO: 35460 - DNA, 19 bp, synthetic construct
  source 1..19: mol_type = other DNA
tgtctaagctgtgcctaaa

SEQ ID NO: 35461 - DNA, 19 bp, synthetic construct
  source 1..19: mol_type = other DNA
ttgtctaagctgtgcctaa

SEQ ID NO: 35462 - DNA, 19 bp, synthetic construct
  source 1..19: mol_type = other DNA
cttgtctaagctgtgccta

SEQ ID NO: 35463 - DNA, 19 bp, synthetic construct
  source 1..19: mol_type = other DNA
gcttgtctaagctgtgcct

SEQ ID NO: 35464 - DNA, 19 bp, synthetic construct
  source 1..19: mol_type = other DNA
cgcttgtctaagctgtgcc

SEQ ID NO: 35465 - DNA, 19 bp, synthetic construct
  source 1..19: mol_type = other DNA
acgcttgtctaagctgtgc

SEQ ID NO: 35466 - DNA, 19 bp, synthetic construct
  source 1..19: mol_type = other DNA
aacgcttgtctaagctgtg

SEQ ID NO: 35467 - DNA, 19 bp, synthetic construct
  source 1..19: mol_type = other DNA
taacgcttgtctaagctgt

SEQ ID NO: 35468 - DNA, 19 bp, synthetic construct
  source 1..19: mol_type = other DNA
gtaacgcttgtctaagctg

SEQ ID NO: 35469 - DNA, 19 bp, synthetic construct
  source 1..19: mol_type = other DNA
tgtaacgcttgtctaagct

SEQ ID NO: 35470 - DNA, 19 bp, synthetic construct
  source 1..19: mol_type = other DNA
atgtaacgcttgtctaagc

SEQ ID NO: 35471 - DNA, 19 bp, synthetic construct
  source 1..19: mol_type = other DNA
gatgtaacgcttgtctaag

SEQ ID NO: 35472 - DNA, 19 bp, synthetic construct
  source 1..19: mol_type = other DNA
tgatgtaacgcttgtctaa

SEQ ID NO: 35473 - DNA, 19 bp, synthetic construct
  source 1..19: mol_type = other DNA
gtgatgtaacgcttgtcta

SEQ ID NO: 35474 - DNA, 19 bp, synthetic construct
  source 1..19: mol_type = other DNA
tgtgatgtaacgcttgtct

SEQ ID NO: 35475 - DNA, 19 bp, synthetic construct
  source 1..19: mol_type = other DNA
atgtgatgtaacgcttgtc

SEQ ID NO: 35476 - DNA, 19 bp, synthetic construct
  source 1..19: mol_type = other DNA
catgtgatgtaacgcttgt

SEQ ID NO: 35477 - DNA, 19 bp, synthetic construct
  source 1..19: mol_type = other DNA
tcatgtgatgtaacgcttg

SEQ ID NO: 35478 - DNA, 19 bp, synthetic construct
  source 1..19: mol_type = other DNA
ctcatgtgatgtaacgctt

SEQ ID NO: 35479 - DNA, 19 bp, synthetic construct
  source 1..19: mol_type = other DNA
actcatgtgatgtaacgct

SEQ ID NO: 35480 - DNA, 19 bp, synthetic construct
  source 1..19: mol_type = other DNA
cactcatgtgatgtaacgc

SEQ ID NO: 35481 - DNA, 19 bp, synthetic construct
  source 1..19: mol_type = other DNA
tcactcatgtgatgtaacg

SEQ ID NO: 35482 - DNA, 19 bp, synthetic construct
  source 1..19: mol_type = other DNA
atcactcatgtgatgtaac

SEQ ID NO: 35483 - DNA, 19 bp, synthetic construct
  source 1..19: mol_type = other DNA
gatcactcatgtgatgtaa

SEQ ID NO: 35484 - DNA, 19 bp, synthetic construct
  source 1..19: mol_type = other DNA
tgatcactcatgtgatgta

SEQ ID NO: 35485 - DNA, 19 bp, synthetic construct
  source 1..19: mol_type = other DNA
atgatcactcatgtgatgt

SEQ ID NO: 35486 - DNA, 19 bp, synthetic construct
  source 1..19: mol_type = other DNA
caatgatcactcatgtgat

SEQ ID NO: 35487 - DNA, 19 bp, synthetic construct
  source 1..19: mol_type = other DNA
gcaatgatcactcatgtga

SEQ ID NO: 35488 - DNA, 19 bp, synthetic construct
  source 1..19: mol_type = other DNA
tgcaatgatcactcatgtg

SEQ ID NO: 35489 - DNA, 19 bp, synthetic construct
  source 1..19: mol_type = other DNA
ctgcaatgatcactcatgt

SEQ ID NO: 35490 - DNA, 19 bp, synthetic construct
  source 1..19: mol_type = other DNA
tctgcaatgatcactcatg

SEQ ID NO: 35491 - DNA, 19 bp, synthetic construct
  source 1..19: mol_type = other DNA
ctctgcaatgatcactcat

SEQ ID NO: 35492 - DNA, 19 bp, synthetic construct
  source 1..19: mol_type = other DNA
actctgcaatgatcactca

SEQ ID NO: 35493 - DNA, 19 bp, synthetic construct
  source 1..19: mol_type = other DNA
aactctgcaatgatcactc

SEQ ID NO: 35494 - DNA, 19 bp, synthetic construct
  source 1..19: mol_type = other DNA
taactctgcaatgatcact

SEQ ID NO: 35495 - DNA, 19 bp, synthetic construct
  source 1..19: mol_type = other DNA
cataactctgcaatgatca

SEQ ID NO: 35496 - DNA, 19 bp, synthetic construct
  source 1..19: mol_type = other DNA
gtgacataactctgcaatg

SEQ ID NO: 35497 - DNA, 19 bp, synthetic construct
  source 1..19: mol_type = other DNA
agtgacataactctgcaat

SEQ ID NO: 35498 - DNA, 19 bp, synthetic construct
  source 1..19: mol_type = other DNA
tagtgacataactctgcaa

SEQ ID NO: 35499 - DNA, 19 bp, synthetic construct
  source 1..19: mol_type = other DNA
atagtgacataactctgca

SEQ ID NO: 35500 - DNA, 19 bp, synthetic construct
  source 1..19: mol_type = other DNA
catagtgacataactctgc

SEQ ID NO: 35501 - DNA, 19 bp, synthetic construct
  source 1..19: mol_type = other DNA
gcatagtgacataactctg

SEQ ID NO: 35502 - DNA, 19 bp, synthetic construct
  source 1..19: mol_type = other DNA
ggcatagtgacataactct

SEQ ID NO: 35503 - DNA, 19 bp, synthetic construct
  source 1..19: mol_type = other DNA
gggcatagtgacataactc

SEQ ID NO: 35504 - DNA, 19 bp, synthetic construct
  source 1..19: mol_type = other DNA
ggggcatagtgacataact

SEQ ID NO: 35505 - DNA, 19 bp, synthetic construct
  source 1..19: mol_type = other DNA
gggggcatagtgacataac

SEQ ID NO: 35506 - DNA, 19 bp, synthetic construct
  source 1..19: mol_type = other DNA
tgggggcatagtgacataa

SEQ ID NO: 35507 - DNA, 19 bp, synthetic construct
  source 1..19: mol_type = other DNA
atgggggcatagtgacata

SEQ ID NO: 35508 - DNA, 19 bp, synthetic construct
  source 1..19: mol_type = other DNA
tatgggggcatagtgacat

SEQ ID NO: 35509 - DNA, 19 bp, synthetic construct
  source 1..19: mol_type = other DNA
ctatgggggcatagtgaca

SEQ ID NO: 35510 - DNA, 19 bp, synthetic construct
  source 1..19: mol_type = other DNA
cctatgggggcatagtgac

SEQ ID NO: 35511 - DNA, 19 bp, synthetic construct
  source 1..19: mol_type = other DNA
gcctatgggggcatagtga

SEQ ID NO: 35512 - DNA, 19 bp, synthetic construct
  source 1..19: mol_type = other DNA
tgcctatgggggcatagtg

SEQ ID NO: 35513 - DNA, 19 bp, synthetic construct
  source 1..19: mol_type = other DNA
ctgcctatgggggcatagt

SEQ ID NO: 35514 - DNA, 19 bp, synthetic construct
  source 1..19: mol_type = other DNA
tctgcctatgggggcatag

SEQ ID NO: 35515 - DNA, 19 bp, synthetic construct
  source 1..19: mol_type = other DNA
atctgcctatgggggcata

SEQ ID NO: 35516 - DNA, 19 bp, synthetic construct
  source 1..19: mol_type = other DNA
gatctgcctatgggggcat

SEQ ID NO: 35517 - DNA, 19 bp, synthetic construct
  source 1..19: mol_type = other DNA
ttggatctgcctatggggg

SEQ ID NO: 35518 - DNA, 19 bp, synthetic construct
  source 1..19: mol_type = other DNA
cttggatctgcctatgggg

SEQ ID NO: 35519 - DNA, 19 bp, synthetic construct
  source 1..19: mol_type = other DNA
tcttggatctgcctatggg

SEQ ID NO: 35520 - DNA, 19 bp, synthetic construct
  source 1..19: mol_type = other DNA
gtcttggatctgcctatgg

SEQ ID NO: 35521 - DNA, 19 bp, synthetic construct
  source 1..19: mol_type = other DNA
tgtcttggatctgcctatg

SEQ ID NO: 35522 - DNA, 19 bp, synthetic construct
  source 1..19: mol_type = other DNA
ttgtcttggatctgcctat

SEQ ID NO: 35523 - DNA, 19 bp, synthetic construct
  source 1..19: mol_type = other DNA
cttgtcttggatctgccta

SEQ ID NO: 35524 - DNA, 19 bp, synthetic construct
  source 1..19: mol_type = other DNA
tcttgtcttggatctgcct

SEQ ID NO: 35525 - DNA, 19 bp, synthetic construct
  source 1..19: mol_type = other DNA
ctcttgtcttggatctgcc

SEQ ID NO: 35526 - DNA, 19 bp, synthetic construct
  source 1..19: mol_type = other DNA
actcttgtcttggatctgc

SEQ ID NO: 35527 - DNA, 19 bp, synthetic construct
  source 1..19: mol_type = other DNA
gactcttgtcttggatctg

SEQ ID NO: 35528 - DNA, 19 bp, synthetic construct
  source 1..19: mol_type = other DNA
ggactcttgtcttggatct

SEQ ID NO: 35529 - DNA, 19 bp, synthetic construct
  source 1..19: mol_type = other DNA
tggactcttgtcttggatc

SEQ ID NO: 35530 - DNA, 19 bp, synthetic construct
  source 1..19: mol_type = other DNA
atggactcttgtcttggat

SEQ ID NO: 35531 - DNA, 19 bp, synthetic construct
  source 1..19: mol_type = other DNA
gatggactcttgtcttgga

SEQ ID NO: 35532 - DNA, 19 bp, synthetic construct
  source 1..19: mol_type = other DNA
tgatggactcttgtcttgg

SEQ ID NO: 35533 - DNA, 19 bp, synthetic construct
  source 1..19: mol_type = other DNA
gtgatggactcttgtcttg

SEQ ID NO: 35534 - DNA, 19 bp, synthetic construct
  source 1..19: mol_type = other DNA
ggtgatggactcttgtctt

SEQ ID NO: 35535 - DNA, 19 bp, synthetic construct
  source 1..19: mol_type = other DNA
aggtgatggactcttgtct

SEQ ID NO: 35536 - DNA, 19 bp, synthetic construct
  source 1..19: mol_type = other DNA
caggtgatggactcttgtc

SEQ ID NO: 35537 - DNA, 19 bp, synthetic construct
  source 1..19: mol_type = other DNA
ccaggtgatggactcttgt

SEQ ID NO: 35538 - DNA, 19 bp, synthetic construct
  source 1..19: mol_type = other DNA
cccaggtgatggactcttg

SEQ ID NO: 35539 - DNA, 19 bp, synthetic construct
  source 1..19: mol_type = other DNA
acccaggtgatggactctt

SEQ ID NO: 35540 - DNA, 19 bp, synthetic construct
  source 1..19: mol_type = other DNA
cacccaggtgatggactct

SEQ ID NO: 35541 - DNA, 19 bp, synthetic construct
  source 1..19: mol_type = other DNA
tcacccaggtgatggactc

SEQ ID NO: 35542 - DNA, 19 bp, synthetic construct
  source 1..19: mol_type = other DNA
atcacccaggtgatggact

SEQ ID NO: 35543 - DNA, 19 bp, synthetic construct
  source 1..19: mol_type = other DNA
ttctgcactgatcacccag

SEQ ID NO: 35544 - DNA, 19 bp, synthetic construct
  source 1..19: mol_type = other DNA
tttctgcactgatcaccca

SEQ ID NO: 35545 - DNA, 19 bp, synthetic construct
  source 1..19: mol_type = other DNA
atttctgcactgatcaccc

SEQ ID NO: 35546 - DNA, 19 bp, synthetic construct
  source 1..19: mol_type = other DNA
tatttctgcactgatcacc

SEQ ID NO: 35547 - DNA, 19 bp, synthetic construct
  source 1..19: mol_type = other DNA
atatttctgcactgatcac

SEQ ID NO: 35548 - DNA, 19 bp, synthetic construct
  source 1..19: mol_type = other DNA
catatttctgcactgatca

SEQ ID NO: 35549 - DNA, 19 bp, synthetic construct
  source 1..19: mol_type = other DNA
gcatatttctgcactgatc

SEQ ID NO: 35550 - DNA, 19 bp, synthetic construct
  source 1..19: mol_type = other DNA
ggcatatttctgcactgat

SEQ ID NO: 35551 - DNA, 19 bp, synthetic construct
  source 1..19: mol_type = other DNA
tggcatatttctgcactga

SEQ ID NO: 35552 - DNA, 19 bp, synthetic construct
  source 1..19: mol_type = other DNA
gtggcatatttctgcactg

SEQ ID NO: 35553 - DNA, 19 bp, synthetic construct
  source 1..19: mol_type = other DNA
tgtggcatatttctgcact

SEQ ID NO: 35554 - DNA, 19 bp, synthetic construct
  source 1..19: mol_type = other DNA
ttgtggcatatttctgcac

SEQ ID NO: 35555 - DNA, 19 bp, synthetic construct
  source 1..19: mol_type = other DNA
attgtggcatatttctgca

SEQ ID NO: 35556 - DNA, 19 bp, synthetic construct
  source 1..19: mol_type = other DNA
cattgtggcatatttctgc

SEQ ID NO: 35557 - DNA, 19 bp, synthetic construct
  source 1..19: mol_type = other DNA
gcattgtggcatatttctg

SEQ ID NO: 35558 - DNA, 19 bp, synthetic construct
  source 1..19: mol_type = other DNA
ggcattgtggcatatttct

SEQ ID NO: 35559 - DNA, 19 bp, synthetic construct
  source 1..19: mol_type = other DNA
cggcattgtggcatatttc

SEQ ID NO: 35560 - DNA, 19 bp, synthetic construct
  source 1..19: mol_type = other DNA
gcggcattgtggcatattt

SEQ ID NO: 35561 - DNA, 19 bp, synthetic construct
  source 1..19: mol_type = other DNA
ggcggcattgtggcatatt

SEQ ID NO: 35562 - DNA, 19 bp, synthetic construct
  source 1..19: mol_type = other DNA
tggcggcattgtggcatat

SEQ ID NO: 35563 - DNA, 19 bp, synthetic construct
  source 1..19: mol_type = other DNA
ctggcggcattgtggcata

SEQ ID NO: 35564 - DNA, 19 bp, synthetic construct
  source 1..19: mol_type = other DNA
actggcggcattgtggcat

SEQ ID NO: 35565 - DNA, 19 bp, synthetic construct
  source 1..19: mol_type = other DNA
tactggcggcattgtggca

SEQ ID NO: 35566 - DNA, 19 bp, synthetic construct
  source 1..19: mol_type = other DNA
ctactggcggcattgtggc

SEQ ID NO: 35567 - DNA, 19 bp, synthetic construct
  source 1..19: mol_type = other DNA
cctactggcggcattgtgg

SEQ ID NO: 35568 - DNA, 19 bp, synthetic construct
  source 1..19: mol_type = other DNA
gcctactggcggcattgtg

SEQ ID NO: 35569 - DNA, 19 bp, synthetic construct
  source 1..19: mol_type = other DNA
tgcctactggcggcattgt

SEQ ID NO: 35570 - DNA, 19 bp, synthetic construct
  source 1..19: mol_type = other DNA
ctgcctactggcggcattg

SEQ ID NO: 35571 - DNA, 19 bp, synthetic construct
  source 1..19: mol_type = other DNA
tctgcctactggcggcatt

SEQ ID NO: 35572 - DNA, 19 bp, synthetic construct
  source 1..19: mol_type = other DNA
atctgcctactggcggcat

SEQ ID NO: 35573 - DNA, 19 bp, synthetic construct
  source 1..19: mol_type = other DNA
tatctgcctactggcggca

SEQ ID NO: 35574 - DNA, 19 bp, synthetic construct
  source 1..19: mol_type = other DNA
atatctgcctactggcggc

SEQ ID NO: 35575 - DNA, 19 bp, synthetic construct
  source 1..19: mol_type = other DNA
tatatctgcctactggcgg

SEQ ID NO: 35576 - DNA, 19 bp, synthetic construct
  source 1..19: mol_type = other DNA
ctatatctgcctactggcg

SEQ ID NO: 35577 - DNA, 19 bp, synthetic construct
  source 1..19: mol_type = other DNA
tctatatctgcctactggc

SEQ ID NO: 35578 - DNA, 19 bp, synthetic construct
  source 1..19: mol_type = other DNA
gtctatatctgcctactgg

SEQ ID NO: 35579 - DNA, 19 bp, synthetic construct
  source 1..19: mol_type = other DNA
tgtctatatctgcctactg

SEQ ID NO: 35580 - DNA, 19 bp, synthetic construct
  source 1..19: mol_type = other DNA
ttgtctatatctgcctact

SEQ ID NO: 35581 - DNA, 19 bp, synthetic construct
  source 1..19: mol_type = other DNA
cttgtctatatctgcctac

SEQ ID NO: 35582 - DNA, 19 bp, synthetic construct
  source 1..19: mol_type = other DNA
tcttgtctatatctgccta

SEQ ID NO: 35583 - DNA, 19 bp, synthetic construct
  source 1..19: mol_type = other DNA
ctcttgtctatatctgcct

SEQ ID NO: 35584 - DNA, 19 bp, synthetic construct
  source 1..19: mol_type = other DNA
actcttgtctatatctgcc

SEQ ID NO: 35585 - DNA, 19 bp, synthetic construct
  source 1..19: mol_type = other DNA
aactcttgtctatatctgc

SEQ ID NO: 35586 - DNA, 19 bp, synthetic construct
  source 1..19: mol_type = other DNA
gtaactcttgtctatatct

SEQ ID NO: 35587 - DNA, 19 bp, synthetic construct
  source 1..19: mol_type = other DNA
tgtaactcttgtctatatc

SEQ ID NO: 35588 - DNA, 19 bp, synthetic construct
  source 1..19: mol_type = other DNA
gatgtaactcttgtctata

SEQ ID NO: 35589 - DNA, 19 bp, synthetic construct
  source 1..19: mol_type = other DNA
tgatgtaactcttgtctat

SEQ ID NO: 35590 - DNA, 19 bp, synthetic construct
  source 1..19: mol_type = other DNA
gcaggtgatgtaactcttg

SEQ ID NO: 35591 - DNA, 19 bp, synthetic construct
  source 1..19: mol_type = other DNA
cgcaggtgatgtaactctt

SEQ ID NO: 35592 - DNA, 19 bp, synthetic construct
  source 1..19: mol_type = other DNA
acgcaggtgatgtaactct

SEQ ID NO: 35593 - DNA, 19 bp, synthetic construct
  source 1..19: mol_type = other DNA
cacgcaggtgatgtaactc

SEQ ID NO: 35594 - DNA, 19 bp, synthetic construct
  source 1..19: mol_type = other DNA
tcacgcaggtgatgtaact

SEQ ID NO: 35595 - DNA, 19 bp, synthetic construct
  source 1..19: mol_type = other DNA
atcacgcaggtgatgtaac

SEQ ID NO: 35596 - DNA, 19 bp, synthetic construct
  source 1..19: mol_type = other DNA
gatcacgcaggtgatgtaa

SEQ ID NO: 35597 - DNA, 19 bp, synthetic construct
  source 1..19: mol_type = other DNA
tgatcacgcaggtgatgta

SEQ ID NO: 35598 - DNA, 19 bp, synthetic construct
  source 1..19: mol_type = other DNA
gtgatcacgcaggtgatgt

SEQ ID NO: 35599 - DNA, 19 bp, synthetic construct
  source 1..19: mol_type = other DNA
agtgatcacgcaggtgatg

SEQ ID NO: 35600 - DNA, 19 bp, synthetic construct
  source 1..19: mol_type = other DNA
cagtgatcacgcaggtgat

SEQ ID NO: 35601 - DNA, 19 bp, synthetic construct
  source 1..19: mol_type = other DNA
gcagtgatcacgcaggtga

SEQ ID NO: 35602 - DNA, 19 bp, synthetic construct
  source 1..19: mol_type = other DNA
tgcagtgatcacgcaggtg

SEQ ID NO: 35603 - DNA, 19 bp, synthetic construct
  source 1..19: mol_type = other DNA
ctgcagtgatcacgcaggt

SEQ ID NO: 35604 - DNA, 19 bp, synthetic construct
  source 1..19: mol_type = other DNA
tctgcagtgatcacgcagg

SEQ ID NO: 35605 - DNA, 19 bp, synthetic construct
  source 1..19: mol_type = other DNA
ctctgcagtgatcacgcag

SEQ ID NO: 35606 - DNA, 19 bp, synthetic construct
  source 1..19: mol_type = other DNA
tctctgcagtgatcacgca

SEQ ID NO: 35607 - DNA, 19 bp, synthetic construct
  source 1..19: mol_type = other DNA
atctctgcagtgatcacgc

SEQ ID NO: 35608 - DNA, 19 bp, synthetic construct
  source 1..19: mol_type = other DNA
tatctctgcagtgatcacg

SEQ ID NO: 35609 - DNA, 19 bp, synthetic construct
  source 1..19: mol_type = other DNA
atatctctgcagtgatcac

SEQ ID NO: 35610 - DNA, 19 bp, synthetic construct
  source 1..19: mol_type = other DNA
tatatctctgcagtgatca

SEQ ID NO: 35611 - DNA, 19 bp, synthetic construct
  source 1..19: mol_type = other DNA
atatatctctgcagtgatc

SEQ ID NO: 35612 - DNA, 19 bp, synthetic construct
  source 1..19: mol_type = other DNA
gatatatctctgcagtgat

SEQ ID NO: 35613 - DNA, 19 bp, synthetic construct
  source 1..19: mol_type = other DNA
tgatatatctctgcagtga

SEQ ID NO: 35614 - DNA, 19 bp, synthetic construct
  source 1..19: mol_type = other DNA
gtgatatatctctgcagtg

SEQ ID NO: 35615 - DNA, 19 bp, synthetic construct
  source 1..19: mol_type = other DNA
tgtgatatatctctgcagt

SEQ ID NO: 35616 - DNA, 19 bp, synthetic construct
  source 1..19: mol_type = other DNA
ttgtgatatatctctgcag

SEQ ID NO: 35617 - DNA, 19 bp, synthetic construct
  source 1..19: mol_type = other DNA
attgtgatatatctctgca

SEQ ID NO: 35618 - DNA, 19 bp, synthetic construct
  source 1..19: mol_type = other DNA
cattgtgatatatctctgc

SEQ ID NO: 35619 - DNA, 19 bp, synthetic construct
  source 1..19: mol_type = other DNA
gcattgtgatatatctctg

SEQ ID NO: 35620 - DNA, 19 bp, synthetic construct
  source 1..19: mol_type = other DNA
ggcattgtgatatatctct

SEQ ID NO: 35621 - DNA, 19 bp, synthetic construct
  source 1..19: mol_type = other DNA
gggcattgtgatatatctc

SEQ ID NO: 35622 - DNA, 19 bp, synthetic construct
  source 1..19: mol_type = other DNA
ggggcattgtgatatatct

SEQ ID NO: 35623 - DNA, 19 bp, synthetic construct
  source 1..19: mol_type = other DNA
aggggcattgtgatatatc

SEQ ID NO: 35624 - DNA, 19 bp, synthetic construct
  source 1..19: mol_type = other DNA
caggggcattgtgatatat

SEQ ID NO: 35625 - DNA, 19 bp, synthetic construct
  source 1..19: mol_type = other DNA
acaggggcattgtgatata

SEQ ID NO: 35626 - DNA, 19 bp, synthetic construct
  source 1..19: mol_type = other DNA
tacaggggcattgtgatat

SEQ ID NO: 35627 - DNA, 19 bp, synthetic construct
  source 1..19: mol_type = other DNA
ctacaggggcattgtgata

SEQ ID NO: 35628 - DNA, 19 bp, synthetic construct
  source 1..19: mol_type = other DNA
cctacaggggcattgtgat

SEQ ID NO: 35629 - DNA, 19 bp, synthetic construct
  source 1..19: mol_type = other DNA
gactcttgtctaggctctg

SEQ ID NO: 35630 - DNA, 19 bp, synthetic construct
  source 1..19: mol_type = other DNA
ggactcttgtctaggctct

SEQ ID NO: 35631 - DNA, 19 bp, synthetic construct
  source 1..19: mol_type = other DNA
gggactcttgtctaggctc

SEQ ID NO: 35632 - DNA, 19 bp, synthetic construct
  source 1..19: mol_type = other DNA
tgggactcttgtctaggct

SEQ ID NO: 35633 - DNA, 19 bp, synthetic construct
  source 1..19: mol_type = other DNA
atgggactcttgtctaggc

SEQ ID NO: 35634 - DNA, 19 bp, synthetic construct
  source 1..19: mol_type = other DNA
gatgggactcttgtctagg

SEQ ID NO: 35635 - DNA, 19 bp, synthetic construct
  source 1..19: mol_type = other DNA
tgatgggactcttgtctag

SEQ ID NO: 35636 - DNA, 19 bp, synthetic construct
  source 1..19: mol_type = other DNA
gtgatgggactcttgtcta

SEQ ID NO: 35637 - DNA, 19 bp, synthetic construct
  source 1..19: mol_type = other DNA
ggtgatgggactcttgtct

SEQ ID NO: 35638 - DNA, 19 bp, synthetic construct
  source 1..19: mol_type = other DNA
aggtgatgggactcttgtc

SEQ ID NO: 35639 - DNA, 19 bp, synthetic construct
  source 1..19: mol_type = other DNA
caggtgatgggactcttgt

SEQ ID NO: 35640 - DNA, 19 bp, synthetic construct
  source 1..19: mol_type = other DNA
ccaggtgatgggactcttg

SEQ ID NO: 35641 - DNA, 19 bp, synthetic construct
  source 1..19: mol_type = other DNA
actctgcactgatcaccca

SEQ ID NO: 35642 - DNA, 19 bp, synthetic construct
  source 1..19: mol_type = other DNA
aactctgcactgatcaccc

SEQ ID NO: 35643 - DNA, 19 bp, synthetic construct
  source 1..19: mol_type = other DNA
taactctgcactgatcacc

SEQ ID NO: 35644 - DNA, 19 bp, synthetic construct
  source 1..19: mol_type = other DNA
ataactctgcactgatcac

SEQ ID NO: 35645 - DNA, 19 bp, synthetic construct
  source 1..19: mol_type = other DNA
cataactctgcactgatca

SEQ ID NO: 35646 - DNA, 19 bp, synthetic construct
  source 1..19: mol_type = other DNA
acataactctgcactgatc

SEQ ID NO: 35647 - DNA, 19 bp, synthetic construct
  source 1..19: mol_type = other DNA
gacataactctgcactgat

SEQ ID NO: 35648 - DNA, 19 bp, synthetic construct
  source 1..19: mol_type = other DNA
tgacataactctgcactga

SEQ ID NO: 35649 - DNA, 19 bp, synthetic construct
  source 1..19: mol_type = other DNA
gtgacataactctgcactg

SEQ ID NO: 35650 - DNA, 19 bp, synthetic construct
  source 1..19: mol_type = other DNA
tgtgacataactctgcact

SEQ ID NO: 35651 - DNA, 19 bp, synthetic construct
  source 1..19: mol_type = other DNA
ttgtgacataactctgcac

SEQ ID NO: 35652 - DNA, 19 bp, synthetic construct
  source 1..19: mol_type = other DNA
attgtgacataactctgca

SEQ ID NO: 35653 - DNA, 19 bp, synthetic construct
  source 1..19: mol_type = other DNA
cattgtgacataactctgc

SEQ ID NO: 35654 - DNA, 19 bp, synthetic construct
  source 1..19: mol_type = other DNA
gcattgtgacataactctg

SEQ ID NO: 35655 - DNA, 19 bp, synthetic construct
  source 1..19: mol_type = other DNA
ggcattgtgacataactct

SEQ ID NO: 35656 - DNA, 19 bp, synthetic construct
  source 1..19: mol_type = other DNA
gggcattgtgacataactc

SEQ ID NO: 35657 - DNA, 19 bp, synthetic construct
  source 1..19: mol_type = other DNA
ggggcattgtgacataact

SEQ ID NO: 35658 - DNA, 19 bp, synthetic construct
  source 1..19: mol_type = other DNA
gggggcattgtgacataac

SEQ ID NO: 35659 - DNA, 19 bp, synthetic construct
  source 1..19: mol_type = other DNA
agggggcattgtgacataa

SEQ ID NO: 35660 - DNA, 19 bp, synthetic construct
  source 1..19: mol_type = other DNA
aagggggcattgtgacata

SEQ ID NO: 35661 - DNA, 19 bp, synthetic construct
  source 1..19: mol_type = other DNA
aaagggggcattgtgacat

SEQ ID NO: 35662 - DNA, 19 bp, synthetic construct
  source 1..19: mol_type = other DNA
aaaagggggcattgtgaca

SEQ ID NO: 35663 - DNA, 19 bp, synthetic construct
  source 1..19: mol_type = other DNA
caaaagggggcattgtgac

SEQ ID NO: 35664 - DNA, 19 bp, synthetic construct
  source 1..19: mol_type = other DNA
ccaaaagggggcattgtga

SEQ ID NO: 35665 - DNA, 19 bp, synthetic construct
  source 1..19: mol_type = other DNA
gccaaaagggggcattgtg

SEQ ID NO: 35666 - DNA, 19 bp, synthetic construct
  source 1..19: mol_type = other DNA
tgccaaaagggggcattgt

SEQ ID NO: 35667 - DNA, 19 bp, synthetic construct
  source 1..19: mol_type = other DNA
ctgccaaaagggggcattg

SEQ ID NO: 35668 - DNA, 19 bp, synthetic construct
  source 1..19: mol_type = other DNA
tctgccaaaagggggcatt

SEQ ID NO: 35669 - DNA, 19 bp, synthetic construct
  source 1..19: mol_type = other DNA
ctctgccaaaagggggcat

SEQ ID NO: 35670 - DNA, 19 bp, synthetic construct
  source 1..19: mol_type = other DNA
gctctgccaaaagggggca

SEQ ID NO: 35671 - DNA, 19 bp, synthetic construct
  source 1..19: mol_type = other DNA
ggctctgccaaaagggggc

SEQ ID NO: 35672 - DNA, 19 bp, synthetic construct
  source 1..19: mol_type = other DNA
aggctctgccaaaaggggg

SEQ ID NO: 35673 - DNA, 19 bp, synthetic construct
  source 1..19: mol_type = other DNA
taggctctgccaaaagggg

SEQ ID NO: 35674 - DNA, 19 bp, synthetic construct
  source 1..19: mol_type = other DNA
ctaggctctgccaaaaggg

SEQ ID NO: 35675 - DNA, 19 bp, synthetic construct
  source 1..19: mol_type = other DNA
tctaggctctgccaaaagg

SEQ ID NO: 35676 - DNA, 19 bp, synthetic construct
  source 1..19: mol_type = other DNA
gtctaggctctgccaaaag

SEQ ID NO: 35677 - DNA, 19 bp, synthetic construct
  source 1..19: mol_type = other DNA
tgtctaggctctgccaaaa

SEQ ID NO: 35678 - DNA, 19 bp, synthetic construct
  source 1..19: mol_type = other DNA
ttgtctaggctctgccaaa

SEQ ID NO: 35679 - DNA, 19 bp, synthetic construct
  source 1..19: mol_type = other DNA
cttgtctaggctctgccaa

SEQ ID NO: 35680 - DNA, 19 bp, synthetic construct
  source 1..19: mol_type = other DNA
aacccttgtctaggctctg

SEQ ID NO: 35681 - DNA, 19 bp, synthetic construct
  source 1..19: mol_type = other DNA
taacccttgtctaggctct

SEQ ID NO: 35682 - DNA, 19 bp, synthetic construct
  source 1..19: mol_type = other DNA
gtaacccttgtctaggctc

SEQ ID NO: 35683 - DNA, 19 bp, synthetic construct
  source 1..19: mol_type = other DNA
tgtaacccttgtctaggct

SEQ ID NO: 35684 - DNA, 19 bp, synthetic construct
  source 1..19: mol_type = other DNA
atgtaacccttgtctaggc

SEQ ID NO: 35685 - DNA, 19 bp, synthetic construct
  source 1..19: mol_type = other DNA
gatgtaacccttgtctagg

SEQ ID NO: 35686 - DNA, 19 bp, synthetic construct
  source 1..19: mol_type = other DNA
tgatgtaacccttgtctag

SEQ ID NO: 35687 - DNA, 19 bp, synthetic construct
  source 1..19: mol_type = other DNA
gtgatgtaacccttgtcta

SEQ ID NO: 35688 - DNA, 19 bp, synthetic construct
  source 1..19: mol_type = other DNA
ggtgatgtaacccttgtct

SEQ ID NO: 35689 - DNA, 19 bp, synthetic construct
  source 1..19: mol_type = other DNA
ccaggtgatgtaacccttg

SEQ ID NO: 35690 - DNA, 19 bp, synthetic construct
  source 1..19: mol_type = other DNA
cccaggtgatgtaaccctt

SEQ ID NO: 35691 - DNA, 19 bp, synthetic construct
  source 1..19: mol_type = other DNA
acccaggtgatgtaaccct

SEQ ID NO: 35692 - DNA, 19 bp, synthetic construct
  source 1..19: mol_type = other DNA
cacccaggtgatgtaaccc

SEQ ID NO: 35693 - DNA, 19 bp, synthetic construct
  source 1..19: mol_type = other DNA
tcacccaggtgatgtaacc

SEQ ID NO: 35694 - DNA, 19 bp, synthetic construct
  source 1..19: mol_type = other DNA
cattgtgacatatctctgc

SEQ ID NO: 35695 - DNA, 19 bp, synthetic construct
  source 1..19: mol_type = other DNA
acattgtgacatatctctg

SEQ ID NO: 35696 - DNA, 19 bp, synthetic construct
  source 1..19: mol_type = other DNA
gacattgtgacatatctct

SEQ ID NO: 35697 - DNA, 19 bp, synthetic construct
  source 1..19: mol_type = other DNA
ggacattgtgacatatctc

SEQ ID NO: 35698 - DNA, 19 bp, synthetic construct
  source 1..19: mol_type = other DNA
gggacattgtgacatatct

SEQ ID NO: 35699 - DNA, 19 bp, synthetic construct
  source 1..19: mol_type = other DNA
agggacattgtgacatatc

SEQ ID NO: 35700 - DNA, 19 bp, synthetic construct
  source 1..19: mol_type = other DNA
cagggacattgtgacatat

SEQ ID NO: 35701 - DNA, 19 bp, synthetic construct
  source 1..19: mol_type = other DNA
acagggacattgtgacata

SEQ ID NO: 35702 - DNA, 19 bp, synthetic construct
  source 1..19: mol_type = other DNA
tacagggacattgtgacat

SEQ ID NO: 35703 - DNA, 19 bp, synthetic construct
  source 1..19: mol_type = other DNA
ctacagggacattgtgaca

SEQ ID NO: 35704 - DNA, 19 bp, synthetic construct
  source 1..19: mol_type = other DNA
gctacagggacattgtgac

SEQ ID NO: 35705 - DNA, 19 bp, synthetic construct
  source 1..19: mol_type = other DNA
ggctacagggacattgtga

SEQ ID NO: 35706 - DNA, 19 bp, synthetic construct
  source 1..19: mol_type = other DNA
tggctacagggacattgtg

SEQ ID NO: 35707 - DNA, 19 bp, synthetic construct
  source 1..19: mol_type = other DNA
atggctacagggacattgt

SEQ ID NO: 35708 - DNA, 19 bp, synthetic construct
  source 1..19: mol_type = other DNA
tatggctacagggacattg

SEQ ID NO: 35709 - DNA, 19 bp, synthetic construct
  source 1..19: mol_type = other DNA
atatggctacagggacatt

SEQ ID NO: 35710 - DNA, 19 bp, synthetic construct
  source 1..19: mol_type = other DNA
gatatggctacagggacat

SEQ ID NO: 35711 - DNA, 19 bp, synthetic construct
  source 1..19: mol_type = other DNA
ggatatggctacagggaca

SEQ ID NO: 35712 - DNA, 19 bp, synthetic construct
  source 1..19: mol_type = other DNA
aggatatggctacagggac

SEQ ID NO: 35713 - DNA, 19 bp, synthetic construct
  source 1..19: mol_type = other DNA
aaggatatggctacaggga

SEQ ID NO: 35714 - DNA, 19 bp, synthetic construct
  source 1..19: mol_type = other DNA
caaggatatggctacaggg

SEQ ID NO: 35715 - DNA, 19 bp, synthetic construct
  source 1..19: mol_type = other DNA
tcaaggatatggctacagg

SEQ ID NO: 35716 - DNA, 19 bp, synthetic construct
  source 1..19: mol_type = other DNA
gtcaaggatatggctacag

SEQ ID NO: 35717 - DNA, 19 bp, synthetic construct
  source 1..19: mol_type = other DNA
tgtcaaggatatggctaca

SEQ ID NO: 35718 - DNA, 19 bp, synthetic construct
  source 1..19: mol_type = other DNA
ttgtcaaggatatggctac

SEQ ID NO: 35719 - DNA, 19 bp, synthetic construct
  source 1..19: mol_type = other DNA
tttgtcaaggatatggcta

SEQ ID NO: 35720 - DNA, 19 bp, synthetic construct
  source 1..19: mol_type = other DNA
ttttgtcaaggatatggct

SEQ ID NO: 35721 - DNA, 19 bp, synthetic construct
  source 1..19: mol_type = other DNA
cttttgtcaaggatatggc

SEQ ID NO: 35722 - DNA, 19 bp, synthetic construct
  source 1..19: mol_type = other DNA
acttttgtcaaggatatgg

SEQ ID NO: 35723 - DNA, 19 bp, synthetic construct
  source 1..19: mol_type = other DNA
tcacttttgtcaaggatat

SEQ ID NO: 35724 - DNA, 19 bp, synthetic construct
  source 1..19: mol_type = other DNA
gtcacttttgtcaaggata

SEQ ID NO: 35725 - DNA, 19 bp, synthetic construct
  source 1..19: mol_type = other DNA
tgtcacttttgtcaaggat

SEQ ID NO: 35726 - DNA, 19 bp, synthetic construct
  source 1..19: mol_type = other DNA
atgtcacttttgtcaagga

SEQ ID NO: 35727 - DNA, 19 bp, synthetic construct
  source 1..19: mol_type = other DNA
gatgtcacttttgtcaagg

SEQ ID NO: 35728 - DNA, 19 bp, synthetic construct
  source 1..19: mol_type = other DNA
tgatgtcacttttgtcaag

SEQ ID NO: 35729 - DNA, 19 bp, synthetic construct
  source 1..19: mol_type = other DNA
gtgatgtcacttttgtcaa

SEQ ID NO: 35730 - DNA, 19 bp, synthetic construct
  source 1..19: mol_type = other DNA
ggtgatgtcacttttgtca

SEQ ID NO: 35731 - DNA, 19 bp, synthetic construct
  source 1..19: mol_type = other DNA
aggtgatgtcacttttgtc

SEQ ID NO: 35732 - DNA, 19 bp, synthetic construct
  source 1..19: mol_type = other DNA
caggtgatgtcacttttgt

SEQ ID NO: 35733 - DNA, 19 bp, synthetic construct
  source 1..19: mol_type = other DNA
ccaggtgatgtcacttttg

SEQ ID NO: 35734 - DNA, 19 bp, synthetic construct
  source 1..19: mol_type = other DNA
cccaggtgatgtcactttt

SEQ ID NO: 35735 - DNA, 19 bp, synthetic construct
  source 1..19: mol_type = other DNA
acccaggtgatgtcacttt

SEQ ID NO: 35736 - DNA, 19 bp, synthetic construct
  source 1..19: mol_type = other DNA
cacccaggtgatgtcactt

SEQ ID NO: 35737 - DNA, 19 bp, synthetic construct
  source 1..19: mol_type = other DNA
tcacccaggtgatgtcact

SEQ ID NO: 35738 - DNA, 19 bp, synthetic construct
  source 1..19: mol_type = other DNA
atcacccaggtgatgtcac

SEQ ID NO: 35739 - DNA, 19 bp, synthetic construct
  source 1..19: mol_type = other DNA
gatcacccaggtgatgtca

SEQ ID NO: 35740 - DNA, 19 bp, synthetic construct
  source 1..19: mol_type = other DNA
tgatcacccaggtgatgtc

SEQ ID NO: 35741 - DNA, 19 bp, synthetic construct
  source 1..19: mol_type = other DNA
acactgatcacccaggtga

SEQ ID NO: 35742 - DNA, 19 bp, synthetic construct
  source 1..19: mol_type = other DNA
cacactgatcacccaggtg

SEQ ID NO: 35743 - DNA, 19 bp, synthetic construct
  source 1..19: mol_type = other DNA
ccacactgatcacccaggt

SEQ ID NO: 35744 - DNA, 19 bp, synthetic construct
  source 1..19: mol_type = other DNA
tccacactgatcacccagg

SEQ ID NO: 35745 - DNA, 19 bp, synthetic construct
  source 1..19: mol_type = other DNA
ctccacactgatcacccag

SEQ ID NO: 35746 - DNA, 19 bp, synthetic construct
  source 1..19: mol_type = other DNA
tctccacactgatcaccca

SEQ ID NO: 35747 - DNA, 19 bp, synthetic construct
  source 1..19: mol_type = other DNA
atctccacactgatcaccc

SEQ ID NO: 35748 - DNA, 19 bp, synthetic construct
  source 1..19: mol_type = other DNA
tatctccacactgatcacc

SEQ ID NO: 35749 - DNA, 19 bp, synthetic construct
  source 1..19: mol_type = other DNA
atatctccacactgatcac

SEQ ID NO: 35750 - DNA, 19 bp, synthetic construct
  source 1..19: mol_type = other DNA
catatctccacactgatca

SEQ ID NO: 35751 - DNA, 19 bp, synthetic construct
  source 1..19: mol_type = other DNA
acatatctccacactgatc

SEQ ID NO: 35752 - DNA, 19 bp, synthetic construct
  source 1..19: mol_type = other DNA
gacatatctccacactgat

SEQ ID NO: 35753 - DNA, 19 bp, synthetic construct
  source 1..19: mol_type = other DNA
tgacatatctccacactga

SEQ ID NO: 35754 - DNA, 19 bp, synthetic construct
  source 1..19: mol_type = other DNA
gtgacatatctccacactg

SEQ ID NO: 35755 - DNA, 19 bp, synthetic construct
  source 1..19: mol_type = other DNA
tgtgacatatctccacact

SEQ ID NO: 35756 - DNA, 19 bp, synthetic construct
  source 1..19: mol_type = other DNA
ttgtgacatatctccacac

SEQ ID NO: 35757 - DNA, 19 bp, synthetic construct
  source 1..19: mol_type = other DNA
attgtgacatatctccaca

SEQ ID NO: 35758 - DNA, 19 bp, synthetic construct
  source 1..19: mol_type = other DNA
cattgtgacatatctccac

SEQ ID NO: 35759 - DNA, 19 bp, synthetic construct
  source 1..19: mol_type = other DNA
acattgtgacatatctcca

SEQ ID NO: 35760 - DNA, 19 bp, synthetic construct
  source 1..19: mol_type = other DNA
gacattgtgacatatctcc

SEQ ID NO: 35761 - DNA, 19 bp, synthetic construct
  source 1..19: mol_type = other DNA
agacattgtgacatatctc

SEQ ID NO: 35762 - DNA, 19 bp, synthetic construct
  source 1..19: mol_type = other DNA
gagacattgtgacatatct

SEQ ID NO: 35763 - DNA, 19 bp, synthetic construct
  source 1..19: mol_type = other DNA
ggagacattgtgacatatc

SEQ ID NO: 35764 - DNA, 19 bp, synthetic construct
  source 1..19: mol_type = other DNA
tggagacattgtgacatat

SEQ ID NO: 35765 - DNA, 19 bp, synthetic construct
  source 1..19: mol_type = other DNA
ctggagacattgtgacata

SEQ ID NO: 35766 - DNA, 19 bp, synthetic construct
  source 1..19: mol_type = other DNA
actggagacattgtgacat

SEQ ID NO: 35767 - DNA, 19 bp, synthetic construct
  source 1..19: mol_type = other DNA
tactggagacattgtgaca

SEQ ID NO: 35768 - DNA, 19 bp, synthetic construct
  source 1..19: mol_type = other DNA
ctactggagacattgtgac

SEQ ID NO: 35769 - DNA, 19 bp, synthetic construct
  source 1..19: mol_type = other DNA
cctactggagacattgtga

SEQ ID NO: 35770 - DNA, 19 bp, synthetic construct
  source 1..19: mol_type = other DNA
gcctactggagacattgtg

SEQ ID NO: 35771 - DNA, 19 bp, synthetic construct
  source 1..19: mol_type = other DNA
tgcctactggagacattgt

SEQ ID NO: 35772 - DNA, 19 bp, synthetic construct
  source 1..19: mol_type = other DNA
ctgcctactggagacattg

SEQ ID NO: 35773 - DNA, 19 bp, synthetic construct
  source 1..19: mol_type = other DNA
tctgcctactggagacatt

SEQ ID NO: 35774 - DNA, 19 bp, synthetic construct
  source 1..19: mol_type = other DNA
ctctgcctactggagacat

SEQ ID NO: 35775 - DNA, 19 bp, synthetic construct
  source 1..19: mol_type = other DNA
gctctgcctactggagaca

SEQ ID NO: 35776 - DNA, 19 bp, synthetic construct
  source 1..19: mol_type = other DNA
ggctctgcctactggagac

SEQ ID NO: 35777 - DNA, 19 bp, synthetic construct
  source 1..19: mol_type = other DNA
aggctctgcctactggaga

SEQ ID NO: 35778 - DNA, 19 bp, synthetic construct
  source 1..19: mol_type = other DNA
taggctctgcctactggag

SEQ ID NO: 35779 - DNA, 19 bp, synthetic construct
  source 1..19: mol_type = other DNA
ctaggctctgcctactgga

SEQ ID NO: 35780 - DNA, 19 bp, synthetic construct
  source 1..19: mol_type = other DNA
tctaggctctgcctactgg

SEQ ID NO: 35781 - DNA, 19 bp, synthetic construct
  source 1..19: mol_type = other DNA
gtctaggctctgcctactg

SEQ ID NO: 35782 - DNA, 19 bp, synthetic construct
  source 1..19: mol_type = other DNA
tgtctaggctctgcctact

SEQ ID NO: 35783 - DNA, 19 bp, synthetic construct
  source 1..19: mol_type = other DNA
cctgatcacccaggtgatg

SEQ ID NO: 35784 - DNA, 19 bp, synthetic construct
  source 1..19: mol_type = other DNA
ccctgatcacccaggtgat

SEQ ID NO: 35785 - DNA, 19 bp, synthetic construct
  source 1..19: mol_type = other DNA
tatctctgccctgatcacc

SEQ ID NO: 35786 - DNA, 19 bp, synthetic construct
  source 1..19: mol_type = other DNA
atatctctgccctgatcac

SEQ ID NO: 35787 - DNA, 19 bp, synthetic construct
  source 1..19: mol_type = other DNA
catatctctgccctgatca

SEQ ID NO: 35788 - DNA, 19 bp, synthetic construct
  source 1..19: mol_type = other DNA
acatatctctgccctgatc

SEQ ID NO: 35789 - DNA, 19 bp, synthetic construct
  source 1..19: mol_type = other DNA
gacatatctctgccctgat

SEQ ID NO: 35790 - DNA, 19 bp, synthetic construct
  source 1..19: mol_type = other DNA
tgacatatctctgccctga

SEQ ID NO: 35791 - DNA, 19 bp, synthetic construct
  source 1..19: mol_type = other DNA
gtgacatatctctgccctg

SEQ ID NO: 35792 - DNA, 19 bp, synthetic construct
  source 1..19: mol_type = other DNA
tgtgacatatctctgccct

SEQ ID NO: 35793 - DNA, 19 bp, synthetic construct
  source 1..19: mol_type = other DNA
ttgtgacatatctctgccc

SEQ ID NO: 35794 - DNA, 19 bp, synthetic construct
  source 1..19: mol_type = other DNA
attgtgacatatctctgcc

SEQ ID NO: 35795 - DNA, 19 bp, synthetic construct
  source 1..19: mol_type = other DNA
gcattgtgacatatctctg

SEQ ID NO: 35796 - DNA, 19 bp, synthetic construct
  source 1..19: mol_type = other DNA
ggcattgtgacatatctct

SEQ ID NO: 35797 - DNA, 19 bp, synthetic construct
  source 1..19: mol_type = other DNA
gggcattgtgacatatctc

SEQ ID NO: 35798 - DNA, 19 bp, synthetic construct
  source 1..19: mol_type = other DNA
ggggcattgtgacatatct

SEQ ID NO: 35799 - DNA, 19 bp, synthetic construct
  source 1..19: mol_type = other DNA
gggggcattgtgacatatc

SEQ ID NO: 35800 - DNA, 19 bp, synthetic construct
  source 1..19: mol_type = other DNA
agggggcattgtgacatat

SEQ ID NO: 35801 - DNA, 19 bp, synthetic construct
  source 1..19: mol_type = other DNA
cagggggcattgtgacata

SEQ ID NO: 35802 - DNA, 19 bp, synthetic construct
  source 1..19: mol_type = other DNA
acagggggcattgtgacat

SEQ ID NO: 35803 - DNA, 19 bp, synthetic construct
  source 1..19: mol_type = other DNA
tacagggggcattgtgaca

SEQ ID NO: 35804 - DNA, 19 bp, synthetic construct
  source 1..19: mol_type = other DNA
ttacagggggcattgtgac

SEQ ID NO: 35805 - DNA, 19 bp, synthetic construct
  source 1..19: mol_type = other DNA
cttacagggggcattgtga

SEQ ID NO: 35806 - DNA, 19 bp, synthetic construct
  source 1..19: mol_type = other DNA
gcttacagggggcattgtg

SEQ ID NO: 35807 - DNA, 19 bp, synthetic construct
  source 1..19: mol_type = other DNA
tgcttacagggggcattgt

SEQ ID NO: 35808 - DNA, 19 bp, synthetic construct
  source 1..19: mol_type = other DNA
ctgcttacagggggcattg

SEQ ID NO: 35809 - DNA, 19 bp, synthetic construct
  source 1..19: mol_type = other DNA
tctgcttacagggggcatt

SEQ ID NO: 35810 - DNA, 19 bp, synthetic construct
  source 1..19: mol_type = other DNA
atctgcttacagggggcat

SEQ ID NO: 35811 - DNA, 19 bp, synthetic construct
  source 1..19: mol_type = other DNA
gatctgcttacagggggca

SEQ ID NO: 35812 - DNA, 19 bp, synthetic construct
  source 1..19: mol_type = other DNA
ggatctgcttacagggggc

SEQ ID NO: 35813 - DNA, 19 bp, synthetic construct
  source 1..19: mol_type = other DNA
gggatctgcttacaggggg

SEQ ID NO: 35814 - DNA, 19 bp, synthetic construct
  source 1..19: mol_type = other DNA
tgggatctgcttacagggg

SEQ ID NO: 35815 - DNA, 19 bp, synthetic construct
  source 1..19: mol_type = other DNA
ctgggatctgcttacaggg

SEQ ID NO: 35816 - DNA, 19 bp, synthetic construct
  source 1..19: mol_type = other DNA
tctgggatctgcttacagg

SEQ ID NO: 35817 - DNA, 19 bp, synthetic construct
  source 1..19: mol_type = other DNA
gtctgggatctgcttacag

SEQ ID NO: 35818 - DNA, 19 bp, synthetic construct
  source 1..19: mol_type = other DNA
tgtctgggatctgcttaca

SEQ ID NO: 35819 - DNA, 19 bp, synthetic construct
  source 1..19: mol_type = other DNA
ttgtctgggatctgcttac

SEQ ID NO: 35820 - DNA, 19 bp, synthetic construct
  source 1..19: mol_type = other DNA
cttgtctgggatctgctta

SEQ ID NO: 35821 - DNA, 19 bp, synthetic construct
  source 1..19: mol_type = other DNA
tcttgtctgggatctgctt

SEQ ID NO: 35822 - DNA, 19 bp, synthetic construct
  source 1..19: mol_type = other DNA
ctcttgtctgggatctgct

SEQ ID NO: 35823 - DNA, 19 bp, synthetic construct
  source 1..19: mol_type = other DNA
actcttgtctgggatctgc

SEQ ID NO: 35824 - DNA, 19 bp, synthetic construct
  source 1..19: mol_type = other DNA
aactcttgtctgggatctg

SEQ ID NO: 35825 - DNA, 19 bp, synthetic construct
  source 1..19: mol_type = other DNA
caactcttgtctgggatct

SEQ ID NO: 35826 - DNA, 19 bp, synthetic construct
  source 1..19: mol_type = other DNA
gcaactcttgtctgggatc

SEQ ID NO: 35827 - DNA, 19 bp, synthetic construct
  source 1..19: mol_type = other DNA
tgcaactcttgtctgggat

SEQ ID NO: 35828 - DNA, 19 bp, synthetic construct
  source 1..19: mol_type = other DNA
atgcaactcttgtctggga

SEQ ID NO: 35829 - DNA, 19 bp, synthetic construct
  source 1..19: mol_type = other DNA
gatgcaactcttgtctggg

SEQ ID NO: 35830 - DNA, 19 bp, synthetic construct
  source 1..19: mol_type = other DNA
tgatgcaactcttgtctgg

SEQ ID NO: 35831 - DNA, 19 bp, synthetic construct
  source 1..19: mol_type = other DNA
gtgatgcaactcttgtctg

SEQ ID NO: 35832 - DNA, 19 bp, synthetic construct
  source 1..19: mol_type = other DNA
ggtgatgcaactcttgtct

SEQ ID NO: 35833 - DNA, 19 bp, synthetic construct
  source 1..19: mol_type = other DNA
aggtgatgcaactcttgtc

SEQ ID NO: 35834 - DNA, 19 bp, synthetic construct
  source 1..19: mol_type = other DNA
gaggtgatgcaactcttgt

SEQ ID NO: 35835 - DNA, 19 bp, synthetic construct
  source 1..19: mol_type = other DNA
cgaggtgatgcaactcttg

SEQ ID NO: 35836 - DNA, 19 bp, synthetic construct
  source 1..19: mol_type = other DNA
ccgaggtgatgcaactctt

SEQ ID NO: 35837 - DNA, 19 bp, synthetic construct
  source 1..19: mol_type = other DNA
accgaggtgatgcaactct

SEQ ID NO: 35838 - DNA, 19 bp, synthetic construct
  source 1..19: mol_type = other DNA
caccgaggtgatgcaactc

SEQ ID NO: 35839 - DNA, 19 bp, synthetic construct
  source 1..19: mol_type = other DNA
tcaccgaggtgatgcaact

SEQ ID NO: 35840 - DNA, 19 bp, synthetic construct
  source 1..19: mol_type = other DNA
atcaccgaggtgatgcaac

SEQ ID NO: 35841 - DNA, 19 bp, synthetic construct
  source 1..19: mol_type = other DNA
gatcaccgaggtgatgcaa

SEQ ID NO: 35842 - DNA, 19 bp, synthetic construct
  source 1..19: mol_type = other DNA
tgatcaccgaggtgatgca

SEQ ID NO: 35843 - DNA, 19 bp, synthetic construct
  source 1..19: mol_type = other DNA
ctgatcaccgaggtgatgc

SEQ ID NO: 35844 - DNA, 19 bp, synthetic construct
  source 1..19: mol_type = other DNA
actgatcaccgaggtgatg

SEQ ID NO: 35845 - DNA, 19 bp, synthetic construct
  source 1..19: mol_type = other DNA
cactgatcaccgaggtgat

SEQ ID NO: 35846 - DNA, 19 bp, synthetic construct
  source 1..19: mol_type = other DNA
gcactgatcaccgaggtga

SEQ ID NO: 35847 - DNA, 19 bp, synthetic construct
  source 1..19: mol_type = other DNA
tgcactgatcaccgaggtg

SEQ ID NO: 35848 - DNA, 19 bp, synthetic construct
  source 1..19: mol_type = other DNA
ctgcactgatcaccgaggt

SEQ ID NO: 35849 - DNA, 19 bp, synthetic construct
  source 1..19: mol_type = other DNA
tctgcactgatcaccgagg

SEQ ID NO: 35850 - DNA, 19 bp, synthetic construct
  source 1..19: mol_type = other DNA
ctctgcactgatcaccgag

SEQ ID NO: 35851 - DNA, 19 bp, synthetic construct
  source 1..19: mol_type = other DNA
tctctgcactgatcaccga

SEQ ID NO: 35852 - DNA, 19 bp, synthetic construct
  source 1..19: mol_type = other DNA
atctctgcactgatcaccg

SEQ ID NO: 35853 - DNA, 19 bp, synthetic construct
  source 1..19: mol_type = other DNA
gtatctctgcactgatcac

SEQ ID NO: 35854 - DNA, 19 bp, synthetic construct
  source 1..19: mol_type = other DNA
cgtatctctgcactgatca

SEQ ID NO: 35855 - DNA, 19 bp, synthetic construct
  source 1..19: mol_type = other DNA
gacgtatctctgcactgat

SEQ ID NO: 35856 - DNA, 19 bp, synthetic construct
  source 1..19: mol_type = other DNA
tgacgtatctctgcactga

SEQ ID NO: 35857 - DNA, 19 bp, synthetic construct
  source 1..19: mol_type = other DNA
gtgacgtatctctgcactg

SEQ ID NO: 35858 - DNA, 19 bp, synthetic construct
  source 1..19: mol_type = other DNA
tgtgacgtatctctgcact

SEQ ID NO: 35859 - DNA, 19 bp, synthetic construct
  source 1..19: mol_type = other DNA
ttgtgacgtatctctgcac

SEQ ID NO: 35860 - DNA, 19 bp, synthetic construct
  source 1..19: mol_type = other DNA
cattgtgacgtatctctgc

SEQ ID NO: 35861 - DNA, 19 bp, synthetic construct
  source 1..19: mol_type = other DNA
gcattgtgacgtatctctg

SEQ ID NO: 35862 - DNA, 19 bp, synthetic construct
  source 1..19: mol_type = other DNA
ggcattgtgacgtatctct

SEQ ID NO: 35863 - DNA, 19 bp, synthetic construct
  source 1..19: mol_type = other DNA
gggcattgtgacgtatctc

SEQ ID NO: 35864 - DNA, 19 bp, synthetic construct
  source 1..19: mol_type = other DNA
ggggcattgtgacgtatct

SEQ ID NO: 35865 - DNA, 19 bp, synthetic construct
  source 1..19: mol_type = other DNA
aggggcattgtgacgtatc

SEQ ID NO: 35866 - DNA, 19 bp, synthetic construct
  source 1..19: mol_type = other DNA
caggggcattgtgacgtat

SEQ ID NO: 35867 - DNA, 19 bp, synthetic construct
  source 1..19: mol_type = other DNA
acaggggcattgtgacgta

SEQ ID NO: 35868 - DNA, 19 bp, synthetic construct
  source 1..19: mol_type = other DNA
tacaggggcattgtgacgt

SEQ ID NO: 35869 - DNA, 19 bp, synthetic construct
  source 1..19: mol_type = other DNA
ctacaggggcattgtgacg

SEQ ID NO: 35870 - DNA, 19 bp, synthetic construct
  source 1..19: mol_type = other DNA
tatgtaactcttgtctagg

SEQ ID NO: 35871 - DNA, 19 bp, synthetic construct
  source 1..19: mol_type = other DNA
gttatgtaactcttgtcta

SEQ ID NO: 35872 - DNA, 19 bp, synthetic construct
  source 1..19: mol_type = other DNA
ggttatgtaactcttgtct

SEQ ID NO: 35873 - DNA, 19 bp, synthetic construct
  source 1..19: mol_type = other DNA
gggttatgtaactcttgtc

SEQ ID NO: 35874 - DNA, 19 bp, synthetic construct
  source 1..19: mol_type = other DNA
tgggttatgtaactcttgt

SEQ ID NO: 35875 - DNA, 19 bp, synthetic construct
  source 1..19: mol_type = other DNA
ctgggttatgtaactcttg

SEQ ID NO: 35876 - DNA, 19 bp, synthetic construct
  source 1..19: mol_type = other DNA
cctgggttatgtaactctt

SEQ ID NO: 35877 - DNA, 19 bp, synthetic construct
  source 1..19: mol_type = other DNA
acctgggttatgtaactct

SEQ ID NO: 35878 - DNA, 19 bp, synthetic construct
  source 1..19: mol_type = other DNA
cacctgggttatgtaactc

SEQ ID NO: 35879 - DNA, 19 bp, synthetic construct
  source 1..19: mol_type = other DNA
tcacctgggttatgtaact

SEQ ID NO: 35880 - DNA, 19 bp, synthetic construct
  source 1..19: mol_type = other DNA
atcacctgggttatgtaac

SEQ ID NO: 35881 - DNA, 19 bp, synthetic construct
  source 1..19: mol_type = other DNA
gatcacctgggttatgtaa

SEQ ID NO: 35882 - DNA, 19 bp, synthetic construct
  source 1..19: mol_type = other DNA
ggatcacctgggttatgta

SEQ ID NO: 35883 - DNA, 19 bp, synthetic construct
  source 1..19: mol_type = other DNA
cggatcacctgggttatgt

SEQ ID NO: 35884 - DNA, 19 bp, synthetic construct
  source 1..19: mol_type = other DNA
acggatcacctgggttatg

SEQ ID NO: 35885 - DNA, 19 bp, synthetic construct
  source 1..19: mol_type = other DNA
tacggatcacctgggttat

SEQ ID NO: 35886 - DNA, 19 bp, synthetic construct
  source 1..19: mol_type = other DNA
gtacggatcacctgggtta

SEQ ID NO: 35887 - DNA, 19 bp, synthetic construct
  source 1..19: mol_type = other DNA
tgtacggatcacctgggtt

SEQ ID NO: 35888 - DNA, 19 bp, synthetic construct
  source 1..19: mol_type = other DNA
ctgtacggatcacctgggt

SEQ ID NO: 35889 - DNA, 19 bp, synthetic construct
  source 1..19: mol_type = other DNA
tctgtacggatcacctggg

SEQ ID NO: 35890 - DNA, 19 bp, synthetic construct
  source 1..19: mol_type = other DNA
ctctgtacggatcacctgg

SEQ ID NO: 35891 - DNA, 19 bp, synthetic construct
  source 1..19: mol_type = other DNA
actctgtacggatcacctg

SEQ ID NO: 35892 - DNA, 19 bp, synthetic construct
  source 1..19: mol_type = other DNA
cactctgtacggatcacct

SEQ ID NO: 35893 - DNA, 19 bp, synthetic construct
  source 1..19: mol_type = other DNA
tcactctgtacggatcacc

SEQ ID NO: 35894 - DNA, 19 bp, synthetic construct
  source 1..19: mol_type = other DNA
atcactctgtacggatcac

SEQ ID NO: 35895 - DNA, 19 bp, synthetic construct
  source 1..19: mol_type = other DNA
catcactctgtacggatca

SEQ ID NO: 35896 - DNA, 19 bp, synthetic construct
  source 1..19: mol_type = other DNA
acatcactctgtacggatc

SEQ ID NO: 35897 - DNA, 19 bp, synthetic construct
  source 1..19: mol_type = other DNA
gacatcactctgtacggat

SEQ ID NO: 35898 - DNA, 19 bp, synthetic construct
  source 1..19: mol_type = other DNA
tgacatcactctgtacgga

SEQ ID NO: 35899 - DNA, 19 bp, synthetic construct
  source 1..19: mol_type = other DNA
gtgacatcactctgtacgg

SEQ ID NO: 35900 - DNA, 19 bp, synthetic construct
  source 1..19: mol_type = other DNA
tgtgacatcactctgtacg

SEQ ID NO: 35901 - DNA, 19 bp, synthetic construct
  source 1..19: mol_type = other DNA
ttgtgacatcactctgtac

SEQ ID NO: 35902 - DNA, 19 bp, synthetic construct
  source 1..19: mol_type = other DNA
gttgtgacatcactctgta

SEQ ID NO: 35903 - DNA, 19 bp, synthetic construct
  source 1..19: mol_type = other DNA
cgttgtgacatcactctgt

SEQ ID NO: 35904 - DNA, 19 bp, synthetic construct
  source 1..19: mol_type = other DNA
gcgttgtgacatcactctg

SEQ ID NO: 35905 - DNA, 19 bp, synthetic construct
  source 1..19: mol_type = other DNA
ggcgttgtgacatcactct

SEQ ID NO: 35906 - DNA, 19 bp, synthetic construct
  source 1..19: mol_type = other DNA
gggcgttgtgacatcactc

SEQ ID NO: 35907 - DNA, 19 bp, synthetic construct
  source 1..19: mol_type = other DNA
agggcgttgtgacatcact

SEQ ID NO: 35908 - DNA, 19 bp, synthetic construct
  source 1..19: mol_type = other DNA
gagggcgttgtgacatcac

SEQ ID NO: 35909 - DNA, 19 bp, synthetic construct
  source 1..19: mol_type = other DNA
agagggcgttgtgacatca

SEQ ID NO: 35910 - DNA, 19 bp, synthetic construct
  source 1..19: mol_type = other DNA
cagagggcgttgtgacatc

SEQ ID NO: 35911 - DNA, 19 bp, synthetic construct
  source 1..19: mol_type = other DNA
acagagggcgttgtgacat

SEQ ID NO: 35912 - DNA, 19 bp, synthetic construct
  source 1..19: mol_type = other DNA
tacagagggcgttgtgaca

SEQ ID NO: 35913 - DNA, 19 bp, synthetic construct
  source 1..19: mol_type = other DNA
ctacagagggcgttgtgac

SEQ ID NO: 35914 - DNA, 19 bp, synthetic construct
  source 1..19: mol_type = other DNA
cctacagagggcgttgtga

SEQ ID NO: 35915 - DNA, 19 bp, synthetic construct
  source 1..19: mol_type = other DNA
gcctacagagggcgttgtg

SEQ ID NO: 35916 - DNA, 19 bp, synthetic construct
  source 1..19: mol_type = other DNA
tgcctacagagggcgttgt

SEQ ID NO: 35917 - DNA, 19 bp, synthetic construct
  source 1..19: mol_type = other DNA
ctgcctacagagggcgttg

SEQ ID NO: 35918 - DNA, 19 bp, synthetic construct
  source 1..19: mol_type = other DNA
tctgcctacagagggcgtt

SEQ ID NO: 35919 - DNA, 19 bp, synthetic construct
  source 1..19: mol_type = other DNA
tctctgcctacagagggcg

SEQ ID NO: 35920 - DNA, 19 bp, synthetic construct
  source 1..19: mol_type = other DNA
agtctctgcctacagaggg

SEQ ID NO: 35921 - DNA, 19 bp, synthetic construct
  source 1..19: mol_type = other DNA
tagtctctgcctacagagg

SEQ ID NO: 35922 - DNA, 19 bp, synthetic construct
  source 1..19: mol_type = other DNA
ctagtctctgcctacagag

SEQ ID NO: 35923 - DNA, 19 bp, synthetic construct
  source 1..19: mol_type = other DNA
tctagtctctgcctacaga

SEQ ID NO: 35924 - DNA, 19 bp, synthetic construct
  source 1..19: mol_type = other DNA
ttctagtctctgcctacag

SEQ ID NO: 35925 - DNA, 19 bp, synthetic construct
  source 1..19: mol_type = other DNA
tttctagtctctgcctaca

SEQ ID NO: 35926 - DNA, 19 bp, synthetic construct
  source 1..19: mol_type = other DNA
ttttctagtctctgcctac

SEQ ID NO: 35927 - DNA, 19 bp, synthetic construct
  source 1..19: mol_type = other DNA
cttttctagtctctgccta

SEQ ID NO: 35928 - DNA, 19 bp, synthetic construct
  source 1..19: mol_type = other DNA
tcttttctagtctctgcct

SEQ ID NO: 35929 - DNA, 19 bp, synthetic construct
  source 1..19: mol_type = other DNA
ctcttttctagtctctgcc

SEQ ID NO: 35930 - DNA, 19 bp, synthetic construct
  source 1..19: mol_type = other DNA
actcttttctagtctctgc

SEQ ID NO: 35931 - DNA, 19 bp, synthetic construct
  source 1..19: mol_type = other DNA
aactcttttctagtctctg

SEQ ID NO: 35932 - DNA, 19 bp, synthetic construct
  source 1..19: mol_type = other DNA
taactcttttctagtctct

SEQ ID NO: 35933 - DNA, 19 bp, synthetic construct
  source 1..19: mol_type = other DNA
gtaactcttttctagtctc

SEQ ID NO: 35934 - DNA, 19 bp, synthetic construct
  source 1..19: mol_type = other DNA
tgtaactcttttctagtct

SEQ ID NO: 35935 - DNA, 19 bp, synthetic construct
  source 1..19: mol_type = other DNA
atgtaactcttttctagtc

SEQ ID NO: 35936 - DNA, 19 bp, synthetic construct
  source 1..19: mol_type = other DNA
ggtaatgtaactcttttct

SEQ ID NO: 35937 - DNA, 19 bp, synthetic construct
  source 1..19: mol_type = other DNA
ccaggtaatgtaactcttt

SEQ ID NO: 35938 - DNA, 19 bp, synthetic construct
  source 1..19: mol_type = other DNA
cccaggtaatgtaactctt

SEQ ID NO: 35939 - DNA, 19 bp, synthetic construct
  source 1..19: mol_type = other DNA
acccaggtaatgtaactct

SEQ ID NO: 35940 - DNA, 19 bp, synthetic construct
  source 1..19: mol_type = other DNA
cacccaggtaatgtaactc

SEQ ID NO: 35941 - DNA, 19 bp, synthetic construct
  source 1..19: mol_type = other DNA
tcacccaggtaatgtaact

SEQ ID NO: 35942 - DNA, 19 bp, synthetic construct
  source 1..19: mol_type = other DNA
atcacccaggtaatgtaac

SEQ ID NO: 35943 - DNA, 19 bp, synthetic construct
  source 1..19: mol_type = other DNA
gatcacccaggtaatgtaa

SEQ ID NO: 35944 - DNA, 19 bp, synthetic construct
  source 1..19: mol_type = other DNA
tgatcacccaggtaatgta

SEQ ID NO: 35945 - DNA, 19 bp, synthetic construct
  source 1..19: mol_type = other DNA
ctgatcacccaggtaatgt

SEQ ID NO: 35946 - DNA, 19 bp, synthetic construct
  source 1..19: mol_type = other DNA
actgatcacccaggtaatg

SEQ ID NO: 35947 - DNA, 19 bp, synthetic construct
  source 1..19: mol_type = other DNA
cactgatcacccaggtaat

SEQ ID NO: 35948 - DNA, 19 bp, synthetic construct
  source 1..19: mol_type = other DNA
gcactgatcacccaggtaa

SEQ ID NO: 35949 - DNA, 19 bp, synthetic construct
  source 1..19: mol_type = other DNA
tgcactgatcacccaggta

SEQ ID NO: 35950 - DNA, 19 bp, synthetic construct
  source 1..19: mol_type = other DNA
ctacagggggcattgtgac

SEQ ID NO: 35951 - DNA, 19 bp, synthetic construct
  source 1..19: mol_type = other DNA
cctacagggggcattgtga

SEQ ID NO: 35952 - DNA, 19 bp, synthetic construct
  source 1..19: mol_type = other DNA
gcctacagggggcattgtg

SEQ ID NO: 35953 - DNA, 19 bp, synthetic construct
  source 1..19: mol_type = other DNA
tgcctacagggggcattgt

SEQ ID NO: 35954 - DNA, 19 bp, synthetic construct
  source 1..19: mol_type = other DNA
ctgcctacagggggcattg

SEQ ID NO: 35955 - DNA, 19 bp, synthetic construct
  source 1..19: mol_type = other DNA
tctgcctacagggggcatt

SEQ ID NO: 35956 - DNA, 19 bp, synthetic construct
  source 1..19: mol_type = other DNA
tatgctctgcctacagggg

SEQ ID NO: 35957 - DNA, 19 bp, synthetic construct
  source 1..19: mol_type = other DNA
ctatgctctgcctacaggg

SEQ ID NO: 35958 - DNA, 19 bp, synthetic construct
  source 1..19: mol_type = other DNA
tctatgctctgcctacagg

SEQ ID NO: 35959 - DNA, 19 bp, synthetic construct
  source 1..19: mol_type = other DNA
ctctatgctctgcctacag

SEQ ID NO: 35960 - DNA, 19 bp, synthetic construct
  source 1..19: mol_type = other DNA
tctctatgctctgcctaca

SEQ ID NO: 35961 - DNA, 19 bp, synthetic construct
  source 1..19: mol_type = other DNA
ttctctatgctctgcctac

SEQ ID NO: 35962 - DNA, 19 bp, synthetic construct
  source 1..19: mol_type = other DNA
cttctctatgctctgccta

SEQ ID NO: 35963 - DNA, 19 bp, synthetic construct
  source 1..19: mol_type = other DNA
tcttctctatgctctgcct

SEQ ID NO: 35964 - DNA, 19 bp, synthetic construct
  source 1..19: mol_type = other DNA
ctcttctctatgctctgcc

SEQ ID NO: 35965 - DNA, 19 bp, synthetic construct
  source 1..19: mol_type = other DNA
actcttctctatgctctgc

SEQ ID NO: 35966 - DNA, 19 bp, synthetic construct
  source 1..19: mol_type = other DNA
aactcttctctatgctctg

SEQ ID NO: 35967 - DNA, 19 bp, synthetic construct
  source 1..19: mol_type = other DNA
caactcttctctatgctct

SEQ ID NO: 35968 - DNA, 19 bp, synthetic construct
  source 1..19: mol_type = other DNA
gcaactcttctctatgctc

SEQ ID NO: 35969 - DNA, 19 bp, synthetic construct
  source 1..19: mol_type = other DNA
tgcaactcttctctatgct

SEQ ID NO: 35970 - DNA, 19 bp, synthetic construct
  source 1..19: mol_type = other DNA
atgcaactcttctctatgc

SEQ ID NO: 35971 - DNA, 19 bp, synthetic construct
  source 1..19: mol_type = other DNA
gatgcaactcttctctatg

SEQ ID NO: 35972 - DNA, 19 bp, synthetic construct
  source 1..19: mol_type = other DNA
tgatgcaactcttctctat

SEQ ID NO: 35973 - DNA, 19 bp, synthetic construct
  source 1..19: mol_type = other DNA
gtgatgcaactcttctcta

SEQ ID NO: 35974 - DNA, 19 bp, synthetic construct
  source 1..19: mol_type = other DNA
ggtgatgcaactcttctct

SEQ ID NO: 35975 - DNA, 19 bp, synthetic construct
  source 1..19: mol_type = other DNA
aggtgatgcaactcttctc

SEQ ID NO: 35976 - DNA, 19 bp, synthetic construct
  source 1..19: mol_type = other DNA
caggtgatgcaactcttct

SEQ ID NO: 35977 - DNA, 19 bp, synthetic construct
  source 1..19: mol_type = other DNA
ccaggtgatgcaactcttc

SEQ ID NO: 35978 - DNA, 19 bp, synthetic construct
  source 1..19: mol_type = other DNA
cccaggtgatgcaactctt

SEQ ID NO: 35979 - DNA, 19 bp, synthetic construct
  source 1..19: mol_type = other DNA
acccaggtgatgcaactct

SEQ ID NO: 35980 - DNA, 19 bp, synthetic construct
  source 1..19: mol_type = other DNA
cacccaggtgatgcaactc

SEQ ID NO: 35981 - DNA, 19 bp, synthetic construct
  source 1..19: mol_type = other DNA
tcacccaggtgatgcaact

SEQ ID NO: 35982 - DNA, 19 bp, synthetic construct
  source 1..19: mol_type = other DNA
atcacccaggtgatgcaac

SEQ ID NO: 35983 - DNA, 19 bp, synthetic construct
  source 1..19: mol_type = other DNA
gatcacccaggtgatgcaa

SEQ ID NO: 35984 - DNA, 19 bp, synthetic construct
  source 1..19: mol_type = other DNA
tgatcacccaggtgatgca

SEQ ID NO: 35985 - DNA, 19 bp, synthetic construct
  source 1..19: mol_type = other DNA
ctgatcacccaggtgatgc

SEQ ID NO: 35986 - DNA, 19 bp, synthetic construct
  source 1..19: mol_type = other DNA
tacactgatcacccaggtg

SEQ ID NO: 35987 - DNA, 19 bp, synthetic construct
  source 1..19: mol_type = other DNA
ctacactgatcacccaggt

SEQ ID NO: 35988 - DNA, 19 bp, synthetic construct
  source 1..19: mol_type = other DNA
tctacactgatcacccagg

SEQ ID NO: 35989 - DNA, 19 bp, synthetic construct
  source 1..19: mol_type = other DNA
ctctacactgatcacccag

SEQ ID NO: 35990 - DNA, 19 bp, synthetic construct
  source 1..19: mol_type = other DNA
tctctacactgatcaccca

SEQ ID NO: 35991 - DNA, 19 bp, synthetic construct
  source 1..19: mol_type = other DNA
atctctacactgatcaccc

SEQ ID NO: 35992 - DNA, 19 bp, synthetic construct
  source 1..19: mol_type = other DNA
gacatatctctacactgat

SEQ ID NO: 35993 - DNA, 19 bp, synthetic construct
  source 1..19: mol_type = other DNA
tgacatatctctacactga

SEQ ID NO: 35994 - DNA, 19 bp, synthetic construct
  source 1..19: mol_type = other DNA
gtgacatatctctacactg

SEQ ID NO: 35995 - DNA, 19 bp, synthetic construct
  source 1..19: mol_type = other DNA
tgtgacatatctctacact

SEQ ID NO: 35996 - DNA, 19 bp, synthetic construct
  source 1..19: mol_type = other DNA
ttgtgacatatctctacac

SEQ ID NO: 35997 - DNA, 19 bp, synthetic construct
  source 1..19: mol_type = other DNA
attgtgacatatctctaca

SEQ ID NO: 35998 - DNA, 19 bp, synthetic construct
  source 1..19: mol_type = other DNA
cattgtgacatatctctac

SEQ ID NO: 35999 - DNA, 19 bp, synthetic construct
  source 1..19: mol_type = other DNA
acattgtgacatatctcta

SEQ ID NO: 36000 - DNA, 19 bp, synthetic construct
  source 1..19: mol_type = other DNA
ggggacattgtgacatatc

SEQ ID NO: 36001 - DNA, 19 bp, synthetic construct
  source 1..19: mol_type = other DNA
aggggacattgtgacatat

SEQ ID NO: 36002 - DNA, 19 bp, synthetic construct
  source 1..19: mol_type = other DNA
ctaggatctgcctacaggg

SEQ ID NO: 36003 - DNA, 19 bp, synthetic construct
  source 1..19: mol_type = other DNA
tctaggatctgcctacagg

SEQ ID NO: 36004 - DNA, 19 bp, synthetic construct
  source 1..19: mol_type = other DNA
gtctaggatctgcctacag

SEQ ID NO: 36005 - DNA, 19 bp, synthetic construct
  source 1..19: mol_type = other DNA
tgtctaggatctgcctaca

SEQ ID NO: 36006 - DNA, 19 bp, synthetic construct
  source 1..19: mol_type = other DNA
ttgtctaggatctgcctac

SEQ ID NO: 36007 - DNA, 19 bp, synthetic construct
  source 1..19: mol_type = other DNA
cttgtctaggatctgccta

SEQ ID NO: 36008 - DNA, 19 bp, synthetic construct
  source 1..19: mol_type = other DNA
tcttgtctaggatctgcct

SEQ ID NO: 36009 - DNA, 19 bp, synthetic construct
  source 1..19: mol_type = other DNA
ctcttgtctaggatctgcc

SEQ ID NO: 36010 - DNA, 19 bp, synthetic construct
  source 1..19: mol_type = other DNA
actcttgtctaggatctgc

SEQ ID NO: 36011 - DNA, 19 bp, synthetic construct
  source 1..19: mol_type = other DNA
aactcttgtctaggatctg

SEQ ID NO: 36012 - DNA, 19 bp, synthetic construct
  source 1..19: mol_type = other DNA
gcactgatcacctaagtga

SEQ ID NO: 36013 - DNA, 19 bp, synthetic construct
  source 1..19: mol_type = other DNA
tgcactgatcacctaagtg

SEQ ID NO: 36014 - DNA, 19 bp, synthetic construct
  source 1..19: mol_type = other DNA
ctgcactgatcacctaagt

SEQ ID NO: 36015 - DNA, 19 bp, synthetic construct
  source 1..19: mol_type = other DNA
tctgcactgatcacctaag

SEQ ID NO: 36016 - DNA, 19 bp, synthetic construct
  source 1..19: mol_type = other DNA
ctctgcactgatcacctaa

SEQ ID NO: 36017 - DNA, 19 bp, synthetic construct
  source 1..19: mol_type = other DNA
tctctgcactgatcaccta

SEQ ID NO: 36018 - DNA, 19 bp, synthetic construct
  source 1..19: mol_type = other DNA
atctctgcactgatcacct

SEQ ID NO: 36019 - DNA, 19 bp, synthetic construct
  source 1..19: mol_type = other DNA
gtctaggctttggcctaca

SEQ ID NO: 36020 - DNA, 19 bp, synthetic construct
  source 1..19: mol_type = other DNA
tgtctaggctttggcctac

SEQ ID NO: 36021 - DNA, 19 bp, synthetic construct
  source 1..19: mol_type = other DNA
ttgtctaggctttggccta

SEQ ID NO: 36022 - DNA, 19 bp, synthetic construct
  source 1..19: mol_type = other DNA
attgtctaggctttggcct

SEQ ID NO: 36023 - DNA, 19 bp, synthetic construct
  source 1..19: mol_type = other DNA
tattgtctaggctttggcc

SEQ ID NO: 36024 - DNA, 19 bp, synthetic construct
  source 1..19: mol_type = other DNA
ctattgtctaggctttggc

SEQ ID NO: 36025 - DNA, 19 bp, synthetic construct
  source 1..19: mol_type = other DNA
actattgtctaggctttgg

SEQ ID NO: 36026 - DNA, 19 bp, synthetic construct
  source 1..19: mol_type = other DNA
aactattgtctaggctttg

SEQ ID NO: 36027 - DNA, 19 bp, synthetic construct
  source 1..19: mol_type = other DNA
taactattgtctaggcttt

SEQ ID NO: 36028 - DNA, 19 bp, synthetic construct
  source 1..19: mol_type = other DNA
gtaactattgtctaggctt

SEQ ID NO: 36029 - DNA, 19 bp, synthetic construct
  source 1..19: mol_type = other DNA
tgtaactattgtctaggct

SEQ ID NO: 36030 - DNA, 19 bp, synthetic construct
  source 1..19: mol_type = other DNA
atgtaactattgtctaggc

SEQ ID NO: 36031 - DNA, 19 bp, synthetic construct
  source 1..19: mol_type = other DNA
gatgtaactattgtctagg

SEQ ID NO: 36032 - DNA, 19 bp, synthetic construct
  source 1..19: mol_type = other DNA
gtgatgtaactattgtcta

SEQ ID NO: 36033 - DNA, 19 bp, synthetic construct
  source 1..19: mol_type = other DNA
agtgatgtaactattgtct

SEQ ID NO: 36034 - DNA, 19 bp, synthetic construct
  source 1..19: mol_type = other DNA
cccaagtgatgtaactatt

SEQ ID NO: 36035 - DNA, 19 bp, synthetic construct
  source 1..19: mol_type = other DNA
acccaagtgatgtaactat

SEQ ID NO: 36036 - DNA, 19 bp, synthetic construct
  source 1..19: mol_type = other DNA
cacccaagtgatgtaacta

SEQ ID NO: 36037 - DNA, 19 bp, synthetic construct
  source 1..19: mol_type = other DNA
tcacccaagtgatgtaact

SEQ ID NO: 36038 - DNA, 19 bp, synthetic construct
  source 1..19: mol_type = other DNA
atcacccaagtgatgtaac

SEQ ID NO: 36039 - DNA, 19 bp, synthetic construct
  source 1..19: mol_type = other DNA
gatcacccaagtgatgtaa

SEQ ID NO: 36040 - DNA, 19 bp, synthetic construct
  source 1..19: mol_type = other DNA
tgatcacccaagtgatgta

SEQ ID NO: 36041 - DNA, 19 bp, synthetic construct
  source 1..19: mol_type = other DNA
ctgatcacccaagtgatgt

SEQ ID NO: 36042 - DNA, 19 bp, synthetic construct
  source 1..19: mol_type = other DNA
actgatcacccaagtgatg

SEQ ID NO: 36043 - DNA, 19 bp, synthetic construct
  source 1..19: mol_type = other DNA
cactgatcacccaagtgat

SEQ ID NO: 36044 - DNA, 19 bp, synthetic construct
  source 1..19: mol_type = other DNA
ccactgatcacccaagtga

SEQ ID NO: 36045 - DNA, 19 bp, synthetic construct
  source 1..19: mol_type = other DNA
gccactgatcacccaagtg

SEQ ID NO: 36046 - DNA, 19 bp, synthetic construct
  source 1..19: mol_type = other DNA
cgccactgatcacccaagt

SEQ ID NO: 36047 - DNA, 19 bp, synthetic construct
  source 1..19: mol_type = other DNA
tcgccactgatcacccaag

SEQ ID NO: 36048 - DNA, 19 bp, synthetic construct
  source 1..19: mol_type = other DNA
ctcgccactgatcacccaa

SEQ ID NO: 36049 - DNA, 19 bp, synthetic construct
  source 1..19: mol_type = other DNA
tctcgccactgatcaccca

SEQ ID NO: 36050 - DNA, 19 bp, synthetic construct
  source 1..19: mol_type = other DNA
atctcgccactgatcaccc

SEQ ID NO: 36051 - DNA, 19 bp, synthetic construct
  source 1..19: mol_type = other DNA
gatctcgccactgatcacc

SEQ ID NO: 36052 - DNA, 19 bp, synthetic construct
  source 1..19: mol_type = other DNA
agatctcgccactgatcac

SEQ ID NO: 36053 - DNA, 19 bp, synthetic construct
  source 1..19: mol_type = other DNA
gagatctcgccactgatca

SEQ ID NO: 36054 - DNA, 19 bp, synthetic construct
  source 1..19: mol_type = other DNA
agagatctcgccactgatc

SEQ ID NO: 36055 - DNA, 19 bp, synthetic construct
  source 1..19: mol_type = other DNA
gagagatctcgccactgat

SEQ ID NO: 36056 - DNA, 19 bp, synthetic construct
  source 1..19: mol_type = other DNA
tgagagatctcgccactga

SEQ ID NO: 36057 - DNA, 19 bp, synthetic construct
  source 1..19: mol_type = other DNA
gtgagagatctcgccactg

SEQ ID NO: 36058 - DNA, 19 bp, synthetic construct
  source 1..19: mol_type = other DNA
tgtgagagatctcgccact

SEQ ID NO: 36059 - DNA, 19 bp, synthetic construct
  source 1..19: mol_type = other DNA
ttgtgagagatctcgccac

SEQ ID NO: 36060 - DNA, 19 bp, synthetic construct
  source 1..19: mol_type = other DNA
attgtgagagatctcgcca

SEQ ID NO: 36061 - DNA, 19 bp, synthetic construct
  source 1..19: mol_type = other DNA
aattgtgagagatctcgcc

SEQ ID NO: 36062 - DNA, 19 bp, synthetic construct
  source 1..19: mol_type = other DNA
gaattgtgagagatctcgc

SEQ ID NO: 36063 - DNA, 19 bp, synthetic construct
  source 1..19: mol_type = other DNA
ggaattgtgagagatctcg

SEQ ID NO: 36064 - DNA, 19 bp, synthetic construct
  source 1..19: mol_type = other DNA
gggaattgtgagagatctc

SEQ ID NO: 36065 - DNA, 19 bp, synthetic construct
  source 1..19: mol_type = other DNA
ggggaattgtgagagatct

SEQ ID NO: 36066 - DNA, 19 bp, synthetic construct
  source 1..19: mol_type = other DNA
aggggaattgtgagagatc

SEQ ID NO: 36067 - DNA, 19 bp, synthetic construct
  source 1..19: mol_type = other DNA
caggggaattgtgagagat

SEQ ID NO: 36068 - DNA, 19 bp, synthetic construct
  source 1..19: mol_type = other DNA
acaggggaattgtgagaga

SEQ ID NO: 36069 - DNA, 19 bp, synthetic construct
  source 1..19: mol_type = other DNA
tacaggggaattgtgagag

SEQ ID NO: 36070 - DNA, 19 bp, synthetic construct
  source 1..19: mol_type = other DNA
ctacaggggaattgtgaga

SEQ ID NO: 36071 - DNA, 19 bp, synthetic construct
  source 1..19: mol_type = other DNA
cctacaggggaattgtgag

SEQ ID NO: 36072 - DNA, 19 bp, synthetic construct
  source 1..19: mol_type = other DNA
gcctacaggggaattgtga

SEQ ID NO: 36073 - DNA, 19 bp, synthetic construct
  source 1..19: mol_type = other DNA
tgcctacaggggaattgtg

SEQ ID NO: 36074 - DNA, 19 bp, synthetic construct
  source 1..19: mol_type = other DNA
ctgcctacaggggaattgt

SEQ ID NO: 36075 - DNA, 19 bp, synthetic construct
  source 1..19: mol_type = other DNA
tctgcctacaggggaattg

SEQ ID NO: 36076 - DNA, 19 bp, synthetic construct
  source 1..19: mol_type = other DNA
ctctgcctacaggggaatt

SEQ ID NO: 36077 - DNA, 19 bp, synthetic construct
  source 1..19: mol_type = other DNA
gctctgcctacaggggaat

SEQ ID NO: 36078 - DNA, 19 bp, synthetic construct
  source 1..19: mol_type = other DNA
agctctgcctacaggggaa

SEQ ID NO: 36079 - DNA, 19 bp, synthetic construct
  source 1..19: mol_type = other DNA
aagctctgcctacagggga

SEQ ID NO: 36080 - DNA, 19 bp, synthetic construct
  source 1..19: mol_type = other DNA
ataagctctgcctacaggg

SEQ ID NO: 36081 - DNA, 19 bp, synthetic construct
  source 1..19: mol_type = other DNA
tataagctctgcctacagg

SEQ ID NO: 36082 - DNA, 19 bp, synthetic construct
  source 1..19: mol_type = other DNA
gtataagctctgcctacag

SEQ ID NO: 36083 - DNA, 19 bp, synthetic construct
  source 1..19: mol_type = other DNA
tgtataagctctgcctaca

SEQ ID NO: 36084 - DNA, 19 bp, synthetic construct
  source 1..19: mol_type = other DNA
ttgtataagctctgcctac

SEQ ID NO: 36085 - DNA, 19 bp, synthetic construct
  source 1..19: mol_type = other DNA
gttgtataagctctgccta

SEQ ID NO: 36086 - DNA, 19 bp, synthetic construct
  source 1..19: mol_type = other DNA
tgttgtataagctctgcct

SEQ ID NO: 36087 - DNA, 19 bp, synthetic construct
  source 1..19: mol_type = other DNA
ctgttgtataagctctgcc

SEQ ID NO: 36088 - DNA, 19 bp, synthetic construct
  source 1..19: mol_type = other DNA
actgttgtataagctctgc

SEQ ID NO: 36089 - DNA, 19 bp, synthetic construct
  source 1..19: mol_type = other DNA
aactgttgtataagctctg

SEQ ID NO: 36090 - DNA, 19 bp, synthetic construct
  source 1..19: mol_type = other DNA
taactgttgtataagctct

SEQ ID NO: 36091 - DNA, 19 bp, synthetic construct
  source 1..19: mol_type = other DNA
gtaactgttgtataagctc

SEQ ID NO: 36092 - DNA, 19 bp, synthetic construct
  source 1..19: mol_type = other DNA
tgtaactgttgtataagct

SEQ ID NO: 36093 - DNA, 19 bp, synthetic construct
  source 1..19: mol_type = other DNA
atgggggcattgtgacata

SEQ ID NO: 36094 - DNA, 19 bp, synthetic construct
  source 1..19: mol_type = other DNA
tatgggggcattgtgacat

SEQ ID NO: 36095 - DNA, 19 bp, synthetic construct
  source 1..19: mol_type = other DNA
ctatgggggcattgtgaca

SEQ ID NO: 36096 - DNA, 19 bp, synthetic construct
  source 1..19: mol_type = other DNA
cctatgggggcattgtgac

SEQ ID NO: 36097 - DNA, 19 bp, synthetic construct
  source 1..19: mol_type = other DNA
gcctatgggggcattgtga

SEQ ID NO: 36098 - DNA, 19 bp, synthetic construct
  source 1..19: mol_type = other DNA
tgcctatgggggcattgtg

SEQ ID NO: 36099 - DNA, 19 bp, synthetic construct
  source 1..19: mol_type = other DNA
ctgcctatgggggcattgt

SEQ ID NO: 36100 - DNA, 19 bp, synthetic construct
  source 1..19: mol_type = other DNA
tctgcctatgggggcattg

SEQ ID NO: 36101 - DNA, 19 bp, synthetic construct
  source 1..19: mol_type = other DNA
atctgcctatgggggcatt

SEQ ID NO: 36102 - DNA, 19 bp, synthetic construct
  source 1..19: mol_type = other DNA
cgtatttctgcactgatca

SEQ ID NO: 36103 - DNA, 19 bp, synthetic construct
  source 1..19: mol_type = other DNA
acgtatttctgcactgatc

SEQ ID NO: 36104 - DNA, 19 bp, synthetic construct
  source 1..19: mol_type = other DNA
gacgtatttctgcactgat

SEQ ID NO: 36105 - DNA, 19 bp, synthetic construct
  source 1..19: mol_type = other DNA
tgacgtatttctgcactga

SEQ ID NO: 36106 - DNA, 19 bp, synthetic construct
  source 1..19: mol_type = other DNA
gtgacgtatttctgcactg

SEQ ID NO: 36107 - DNA, 19 bp, synthetic construct
  source 1..19: mol_type = other DNA
tgtgacgtatttctgcact

SEQ ID NO: 36108 - DNA, 19 bp, synthetic construct
  source 1..19: mol_type = other DNA
ttgtgacgtatttctgcac

SEQ ID NO: 36109 - DNA, 19 bp, synthetic construct
  source 1..19: mol_type = other DNA
attgtgacgtatttctgca

SEQ ID NO: 36110 - DNA, 19 bp, synthetic construct
  source 1..19: mol_type = other DNA
cattgtgacgtatttctgc

SEQ ID NO: 36111 - DNA, 19 bp, synthetic construct
  source 1..19: mol_type = other DNA
gcattgtgacgtatttctg

SEQ ID NO: 36112 - DNA, 19 bp, synthetic construct
  source 1..19: mol_type = other DNA
ggcattgtgacgtatttct

SEQ ID NO: 36113 - DNA, 19 bp, synthetic construct
  source 1..19: mol_type = other DNA
gggcattgtgacgtatttc

SEQ ID NO: 36114 - DNA, 19 bp, synthetic construct
  source 1..19: mol_type = other DNA
ggggcattgtgacgtattt

SEQ ID NO: 36115 - DNA, 19 bp, synthetic construct
  source 1..19: mol_type = other DNA
gggggcattgtgacgtatt

SEQ ID NO: 36116 - DNA, 19 bp, synthetic construct
  source 1..19: mol_type = other DNA
agggggcattgtgacgtat

SEQ ID NO: 36117 - DNA, 19 bp, synthetic construct
  source 1..19: mol_type = other DNA
aagggggcattgtgacgta

SEQ ID NO: 36118 - DNA, 19 bp, synthetic construct
  source 1..19: mol_type = other DNA
taagggggcattgtgacgt

SEQ ID NO: 36119 - DNA, 19 bp, synthetic construct
  source 1..19: mol_type = other DNA
ctaagggggcattgtgacg

SEQ ID NO: 36120 - DNA, 19 bp, synthetic construct
  source 1..19: mol_type = other DNA
cctaagggggcattgtgac

SEQ ID NO: 36121 - DNA, 19 bp, synthetic construct
  source 1..19: mol_type = other DNA
gcctaagggggcattgtga

SEQ ID NO: 36122 - DNA, 19 bp, synthetic construct
  source 1..19: mol_type = other DNA
tgcctaagggggcattgtg

SEQ ID NO: 36123 - DNA, 19 bp, synthetic construct
  source 1..19: mol_type = other DNA
ctgcctaagggggcattgt

SEQ ID NO: 36124 - DNA, 19 bp, synthetic construct
  source 1..19: mol_type = other DNA
tctgcctaagggggcattg

SEQ ID NO: 36125 - DNA, 19 bp, synthetic construct
  source 1..19: mol_type = other DNA
ctctgcctaagggggcatt

SEQ ID NO: 36126 - DNA, 19 bp, synthetic construct
  source 1..19: mol_type = other DNA
taggctctgcctaaggggg

SEQ ID NO: 36127 - DNA, 19 bp, synthetic construct
  source 1..19: mol_type = other DNA
ctaggctctgcctaagggg

SEQ ID NO: 36128 - DNA, 19 bp, synthetic construct
  source 1..19: mol_type = other DNA
tctaggctctgcctaaggg

SEQ ID NO: 36129 - DNA, 19 bp, synthetic construct
  source 1..19: mol_type = other DNA
gtctaggctctgcctaagg

SEQ ID NO: 36130 - DNA, 19 bp, synthetic construct
  source 1..19: mol_type = other DNA
tgtctaggctctgcctaag

SEQ ID NO: 36131 - DNA, 19 bp, synthetic construct
  source 1..19: mol_type = other DNA
ttgtctaggctctgcctaa

SEQ ID NO: 36132 - DNA, 19 bp, synthetic construct
  source 1..19: mol_type = other DNA
tttgtctaggctctgccta

SEQ ID NO: 36133 - DNA, 19 bp, synthetic construct
  source 1..19: mol_type = other DNA
ttttgtctaggctctgcct

SEQ ID NO: 36134 - DNA, 19 bp, synthetic construct
  source 1..19: mol_type = other DNA
cttttgtctaggctctgcc

SEQ ID NO: 36135 - DNA, 19 bp, synthetic construct
  source 1..19: mol_type = other DNA
gcttttgtctaggctctgc

SEQ ID NO: 36136 - DNA, 19 bp, synthetic construct
  source 1..19: mol_type = other DNA
ggcttttgtctaggctctg

SEQ ID NO: 36137 - DNA, 19 bp, synthetic construct
  source 1..19: mol_type = other DNA
tggggcttttgtctaggct

SEQ ID NO: 36138 - DNA, 19 bp, synthetic construct
  source 1..19: mol_type = other DNA
atggggcttttgtctaggc

SEQ ID NO: 36139 - DNA, 19 bp, synthetic construct
  source 1..19: mol_type = other DNA
gatggggcttttgtctagg

SEQ ID NO: 36140 - DNA, 19 bp, synthetic construct
  source 1..19: mol_type = other DNA
tgatggggcttttgtctag

SEQ ID NO: 36141 - DNA, 19 bp, synthetic construct
  source 1..19: mol_type = other DNA
gtgatggggcttttgtcta

SEQ ID NO: 36142 - DNA, 19 bp, synthetic construct
  source 1..19: mol_type = other DNA
ggtgatggggcttttgtct

SEQ ID NO: 36143 - DNA, 19 bp, synthetic construct
  source 1..19: mol_type = other DNA
aggtgatggggcttttgtc

SEQ ID NO: 36144 - DNA, 19 bp, synthetic construct
  source 1..19: mol_type = other DNA
caggtgatggggcttttgt

SEQ ID NO: 36145 - DNA, 19 bp, synthetic construct
  source 1..19: mol_type = other DNA
ccaggtgatggggcttttg

SEQ ID NO: 36146 - DNA, 19 bp, synthetic construct
  source 1..19: mol_type = other DNA
tccaggtgatggggctttt

SEQ ID NO: 36147 - DNA, 19 bp, synthetic construct
  source 1..19: mol_type = other DNA
atccaggtgatggggcttt

SEQ ID NO: 36148 - DNA, 19 bp, synthetic construct
  source 1..19: mol_type = other DNA
catccaggtgatggggctt

SEQ ID NO: 36149 - DNA, 19 bp, synthetic construct
  source 1..19: mol_type = other DNA
tcatccaggtgatggggct

SEQ ID NO: 36150 - DNA, 19 bp, synthetic construct
  source 1..19: mol_type = other DNA
atcatccaggtgatggggc

SEQ ID NO: 36151 - DNA, 19 bp, synthetic construct
  source 1..19: mol_type = other DNA
aatcatccaggtgatgggg

SEQ ID NO: 36152 - DNA, 19 bp, synthetic construct
  source 1..19: mol_type = other DNA
taatcatccaggtgatggg

SEQ ID NO: 36153 - DNA, 19 bp, synthetic construct
  source 1..19: mol_type = other DNA
ctaatcatccaggtgatgg

SEQ ID NO: 36154 - DNA, 19 bp, synthetic construct
  source 1..19: mol_type = other DNA
actaatcatccaggtgatg

SEQ ID NO: 36155 - DNA, 19 bp, synthetic construct
  source 1..19: mol_type = other DNA
cactaatcatccaggtgat

SEQ ID NO: 36156 - DNA, 19 bp, synthetic construct
  source 1..19: mol_type = other DNA
gcactaatcatccaggtga

SEQ ID NO: 36157 - DNA, 19 bp, synthetic construct
  source 1..19: mol_type = other DNA
tgcactaatcatccaggtg

SEQ ID NO: 36158 - DNA, 19 bp, synthetic construct
  source 1..19: mol_type = other DNA
ctgcactaatcatccaggt

SEQ ID NO: 36159 - DNA, 19 bp, synthetic construct
  source 1..19: mol_type = other DNA
tctgcactaatcatccagg

SEQ ID NO: 36160 - DNA, 19 bp, synthetic construct
  source 1..19: mol_type = other DNA
ctctgcactaatcatccag

SEQ ID NO: 36161 - DNA, 19 bp, synthetic construct
  source 1..19: mol_type = other DNA
actctgcactaatcatcca

SEQ ID NO: 36162 - DNA, 19 bp, synthetic construct
  source 1..19: mol_type = other DNA
aactctgcactaatcatcc

SEQ ID NO: 36163 - DNA, 19 bp, synthetic construct
  source 1..19: mol_type = other DNA
taactctgcactaatcatc

SEQ ID NO: 36164 - DNA, 19 bp, synthetic construct
  source 1..19: mol_type = other DNA
cataactctgcactaatca

SEQ ID NO: 36165 - DNA, 19 bp, synthetic construct
  source 1..19: mol_type = other DNA
gacataactctgcactaat

SEQ ID NO: 36166 - DNA, 19 bp, synthetic construct
  source 1..19: mol_type = other DNA
gtgacataactctgcacta

SEQ ID NO: 36167 - DNA, 19 bp, synthetic construct
  source 1..19: mol_type = other DNA
tttgtgacataactctgca

SEQ ID NO: 36168 - DNA, 19 bp, synthetic construct
  source 1..19: mol_type = other DNA
ctttgtgacataactctgc

SEQ ID NO: 36169 - DNA, 19 bp, synthetic construct
  source 1..19: mol_type = other DNA
actttgtgacataactctg

SEQ ID NO: 36170 - DNA, 19 bp, synthetic construct
  source 1..19: mol_type = other DNA
gactttgtgacataactct

SEQ ID NO: 36171 - DNA, 19 bp, synthetic construct
  source 1..19: mol_type = other DNA
tggcattgtgacatatctc

SEQ ID NO: 36172 - DNA, 19 bp, synthetic construct
  source 1..19: mol_type = other DNA
gtggcattgtgacatatct

SEQ ID NO: 36173 - DNA, 19 bp, synthetic construct
  source 1..19: mol_type = other DNA
agtggcattgtgacatatc

SEQ ID NO: 36174 - DNA, 19 bp, synthetic construct
  source 1..19: mol_type = other DNA
cagtggcattgtgacatat

SEQ ID NO: 36175 - DNA, 19 bp, synthetic construct
  source 1..19: mol_type = other DNA
acagtggcattgtgacata

SEQ ID NO: 36176 - DNA, 19 bp, synthetic construct
  source 1..19: mol_type = other DNA
tacagtggcattgtgacat

SEQ ID NO: 36177 - DNA, 19 bp, synthetic construct
  source 1..19: mol_type = other DNA
ctacagtggcattgtgaca

SEQ ID NO: 36178 - DNA, 19 bp, synthetic construct
  source 1..19: mol_type = other DNA
cctacagtggcattgtgac

SEQ ID NO: 36179 - DNA, 19 bp, synthetic construct
  source 1..19: mol_type = other DNA
gcctacagtggcattgtga

SEQ ID NO: 36180 - DNA, 19 bp, synthetic construct
  source 1..19: mol_type = other DNA
tgcctacagtggcattgtg

SEQ ID NO: 36181 - DNA, 19 bp, synthetic construct
  source 1..19: mol_type = other DNA
ctgcctacagtggcattgt

SEQ ID NO: 36182 - DNA, 19 bp, synthetic construct
  source 1..19: mol_type = other DNA
tctgcctacagtggcattg

SEQ ID NO: 36183 - DNA, 19 bp, synthetic construct
  source 1..19: mol_type = other DNA
ctctgcctacagtggcatt

SEQ ID NO: 36184 - DNA, 19 bp, synthetic construct
  source 1..19: mol_type = other DNA
taggctctgcctacagtgg

SEQ ID NO: 36185 - DNA, 19 bp, synthetic construct
  source 1..19: mol_type = other DNA
ctaggctctgcctacagtg

SEQ ID NO: 36186 - DNA, 19 bp, synthetic construct
  source 1..19: mol_type = other DNA
tctaggctctgcctacagt

SEQ ID NO: 36187 - DNA, 19 bp, synthetic construct
  source 1..19: mol_type = other DNA
ataactcttgtctaggctc

SEQ ID NO: 36188 - DNA, 19 bp, synthetic construct
  source 1..19: mol_type = other DNA
tataactcttgtctaggct

SEQ ID NO: 36189 - DNA, 19 bp, synthetic construct
  source 1..19: mol_type = other DNA
atataactcttgtctaggc

SEQ ID NO: 36190 - DNA, 19 bp, synthetic construct
  source 1..19: mol_type = other DNA
catataactcttgtctagg

SEQ ID NO: 36191 - DNA, 19 bp, synthetic construct
  source 1..19: mol_type = other DNA
gtcatataactcttgtcta

SEQ ID NO: 36192 - DNA, 19 bp, synthetic construct
  source 1..19: mol_type = other DNA
ggtcatataactcttgtct

SEQ ID NO: 36193 - DNA, 19 bp, synthetic construct
  source 1..19: mol_type = other DNA
aggtcatataactcttgtc

SEQ ID NO: 36194 - DNA, 19 bp, synthetic construct
  source 1..19: mol_type = other DNA
taggtcatataactcttgt

SEQ ID NO: 36195 - DNA, 19 bp, synthetic construct
  source 1..19: mol_type = other DNA
ctaggtcatataactcttg

SEQ ID NO: 36196 - DNA, 19 bp, synthetic construct
  source 1..19: mol_type = other DNA
cctaggtcatataactctt

SEQ ID NO: 36197 - DNA, 19 bp, synthetic construct
  source 1..19: mol_type = other DNA
acctaggtcatataactct

SEQ ID NO: 36198 - DNA, 19 bp, synthetic construct
  source 1..19: mol_type = other DNA
cacctaggtcatataactc

SEQ ID NO: 36199 - DNA, 19 bp, synthetic construct
  source 1..19: mol_type = other DNA
tcacctaggtcatataact

SEQ ID NO: 36200 - DNA, 19 bp, synthetic construct
  source 1..19: mol_type = other DNA
atcacctaggtcatataac

SEQ ID NO: 36201 - DNA, 19 bp, synthetic construct
  source 1..19: mol_type = other DNA
gatcacctaggtcatataa

SEQ ID NO: 36202 - DNA, 19 bp, synthetic construct
  source 1..19: mol_type = other DNA
tgatcacctaggtcatata

SEQ ID NO: 36203 - DNA, 19 bp, synthetic construct
  source 1..19: mol_type = other DNA
ctgatcacctaggtcatat

SEQ ID NO: 36204 - DNA, 19 bp, synthetic construct
  source 1..19: mol_type = other DNA
actgatcacctaggtcata

SEQ ID NO: 36205 - DNA, 19 bp, synthetic construct
  source 1..19: mol_type = other DNA
cactgatcacctaggtcat

SEQ ID NO: 36206 - DNA, 19 bp, synthetic construct
  source 1..19: mol_type = other DNA
gcactgatcacctaggtca

SEQ ID NO: 36207 - DNA, 19 bp, synthetic construct
  source 1..19: mol_type = other DNA
tgcactgatcacctaggtc

SEQ ID NO: 36208 - DNA, 19 bp, synthetic construct
  source 1..19: mol_type = other DNA
tctgcactgatcacctagg

SEQ ID NO: 36209 - DNA, 19 bp, synthetic construct
  source 1..19: mol_type = other DNA
ctctgcactgatcacctag

SEQ ID NO: 36210 - DNA, 19 bp, synthetic construct
  source 1..19: mol_type = other DNA
tgtatctctgcactgatca

SEQ ID NO: 36211 - DNA, 19 bp, synthetic construct
  source 1..19: mol_type = other DNA
atgtatctctgcactgatc

SEQ ID NO: 36212 - DNA, 19 bp, synthetic construct
  source 1..19: mol_type = other DNA
ctgcctacaggggcattgc

SEQ ID NO: 36213 - DNA, 19 bp, synthetic construct
  source 1..19: mol_type = other DNA
accacttgtcagggctctg

SEQ ID NO: 36214 - DNA, 19 bp, synthetic construct
  source 1..19: mol_type = other DNA
taccacttgtcagggctct

SEQ ID NO: 36215 - DNA, 19 bp, synthetic construct
  source 1..19: mol_type = other DNA
gtaccacttgtcagggctc

SEQ ID NO: 36216 - DNA, 19 bp, synthetic construct
  source 1..19: mol_type = other DNA
tgtaccacttgtcagggct

SEQ ID NO: 36217 - DNA, 19 bp, synthetic construct
  source 1..19: mol_type = other DNA
atgtaccacttgtcagggc

SEQ ID NO: 36218 - DNA, 19 bp, synthetic construct
  source 1..19: mol_type = other DNA
gatgtaccacttgtcaggg

SEQ ID NO: 36219 - DNA, 19 bp, synthetic construct
  source 1..19: mol_type = other DNA
tgatgtaccacttgtcagg

SEQ ID NO: 36220 - DNA, 19 bp, synthetic construct
  source 1..19: mol_type = other DNA
gtgatgtaccacttgtcag

SEQ ID NO: 36221 - DNA, 19 bp, synthetic construct
  source 1..19: mol_type = other DNA
ggtgatgtaccacttgtca

SEQ ID NO: 36222 - DNA, 19 bp, synthetic construct
  source 1..19: mol_type = other DNA
aggtgatgtaccacttgtc

SEQ ID NO: 36223 - DNA, 19 bp, synthetic construct
  source 1..19: mol_type = other DNA
caggtgatgtaccacttgt

SEQ ID NO: 36224 - DNA, 19 bp, synthetic construct
  source 1..19: mol_type = other DNA
ccaggtgatgtaccacttg

SEQ ID NO: 36225 - DNA, 19 bp, synthetic construct
  source 1..19: mol_type = other DNA
cccaggtgatgtaccactt

SEQ ID NO: 36226 - DNA, 19 bp, synthetic construct
  source 1..19: mol_type = other DNA
acccaggtgatgtaccact

SEQ ID NO: 36227 - DNA, 19 bp, synthetic construct
  source 1..19: mol_type = other DNA
cacccaggtgatgtaccac

SEQ ID NO: 36228 - DNA, 19 bp, synthetic construct
  source 1..19: mol_type = other DNA
tcacccaggtgatgtacca

SEQ ID NO: 36229 - DNA, 19 bp, synthetic construct
  source 1..19: mol_type = other DNA
atcacccaggtgatgtacc

SEQ ID NO: 36230 - DNA, 19 bp, synthetic construct
  source 1..19: mol_type = other DNA
gatcacccaggtgatgtac

SEQ ID NO: 36231 - DNA, 19 bp, synthetic construct
  source 1..19: mol_type = other DNA
cctgcaatgatcacccagg

SEQ ID NO: 36232 - DNA, 19 bp, synthetic construct
  source 1..19: mol_type = other DNA
ccctgcaatgatcacccag

SEQ ID NO: 36233 - DNA, 19 bp, synthetic construct
  source 1..19: mol_type = other DNA
tccctgcaatgatcaccca

SEQ ID NO: 36234 - DNA, 19 bp, synthetic construct
  source 1..19: mol_type = other DNA
atccctgcaatgatcaccc

SEQ ID NO: 36235 - DNA, 19 bp, synthetic construct
  source 1..19: mol_type = other DNA
tatccctgcaatgatcacc

SEQ ID NO: 36236 - DNA, 19 bp, synthetic construct
  source 1..19: mol_type = other DNA
atatccctgcaatgatcac

SEQ ID NO: 36237 - DNA, 19 bp, synthetic construct
  source 1..19: mol_type = other DNA
catatccctgcaatgatca

SEQ ID NO: 36238 - DNA, 19 bp, synthetic construct
  source 1..19: mol_type = other DNA
acatatccctgcaatgatc

SEQ ID NO: 36239 - DNA, 19 bp, synthetic construct
  source 1..19: mol_type = other DNA
gacatatccctgcaatgat

SEQ ID NO: 36240 - DNA, 19 bp, synthetic construct
  source 1..19: mol_type = other DNA
tgacatatccctgcaatga

SEQ ID NO: 36241 - DNA, 19 bp, synthetic construct
  source 1..19: mol_type = other DNA
gtgacatatccctgcaatg

SEQ ID NO: 36242 - DNA, 19 bp, synthetic construct
  source 1..19: mol_type = other DNA
tgtgacatatccctgcaat

SEQ ID NO: 36243 - DNA, 19 bp, synthetic construct
  source 1..19: mol_type = other DNA
ttgtgacatatccctgcaa

SEQ ID NO: 36244 - DNA, 19 bp, synthetic construct
  source 1..19: mol_type = other DNA
tttgtgacatatccctgca

SEQ ID NO: 36245 - DNA, 19 bp, synthetic construct
  source 1..19: mol_type = other DNA
ctttgtgacatatccctgc

SEQ ID NO: 36246 - DNA, 19 bp, synthetic construct
  source 1..19: mol_type = other DNA
gctttgtgacatatccctg

SEQ ID NO: 36247 - DNA, 19 bp, synthetic construct
  source 1..19: mol_type = other DNA
tgctttgtgacatatccct

SEQ ID NO: 36248 - DNA, 19 bp, synthetic construct
  source 1..19: mol_type = other DNA
gtgctttgtgacatatccc

SEQ ID NO: 36249 - DNA, 19 bp, synthetic construct
  source 1..19: mol_type = other DNA
ggtgctttgtgacatatcc

SEQ ID NO: 36250 - DNA, 19 bp, synthetic construct
  source 1..19: mol_type = other DNA
gggtgctttgtgacatatc

SEQ ID NO: 36251 - DNA, 19 bp, synthetic construct
  source 1..19: mol_type = other DNA
agggtgctttgtgacatat

SEQ ID NO: 36252 - DNA, 19 bp, synthetic construct
  source 1..19: mol_type = other DNA
cagggtgctttgtgacata

SEQ ID NO: 36253 - DNA, 19 bp, synthetic construct
  source 1..19: mol_type = other DNA
acagggtgctttgtgacat

SEQ ID NO: 36254 - DNA, 19 bp, synthetic construct
  source 1..19: mol_type = other DNA
tacagggtgctttgtgaca

SEQ ID NO: 36255 - DNA, 19 bp, synthetic construct
  source 1..19: mol_type = other DNA
ctacagggtgctttgtgac

SEQ ID NO: 36256 - DNA, 19 bp, synthetic construct
  source 1..19: mol_type = other DNA
cctacagggtgctttgtga

SEQ ID NO: 36257 - DNA, 19 bp, synthetic construct
  source 1..19: mol_type = other DNA
gcctacagggtgctttgtg

SEQ ID NO: 36258 - DNA, 19 bp, synthetic construct
  source 1..19: mol_type = other DNA
tgcctacagggtgctttgt

SEQ ID NO: 36259 - DNA, 19 bp, synthetic construct
  source 1..19: mol_type = other DNA
ctgcctacagggtgctttg

SEQ ID NO: 36260 - DNA, 19 bp, synthetic construct
  source 1..19: mol_type = other DNA
tctgcctacagggtgcttt

SEQ ID NO: 36261 - DNA, 19 bp, synthetic construct
  source 1..19: mol_type = other DNA
atctgcctacagggtgctt

SEQ ID NO: 36262 - DNA, 19 bp, synthetic construct
  source 1..19: mol_type = other DNA
gatctgcctacagggtgct

SEQ ID NO: 36263 - DNA, 19 bp, synthetic construct
  source 1..19: mol_type = other DNA
aggatctgcctacagggtg

SEQ ID NO: 36264 - DNA, 19 bp, synthetic construct
  source 1..19: mol_type = other DNA
taggatctgcctacagggt

SEQ ID NO: 36265 - DNA, 19 bp, synthetic construct
  source 1..19: mol_type = other DNA
taactcttgtctaggatct

SEQ ID NO: 36266 - DNA, 19 bp, synthetic construct
  source 1..19: mol_type = other DNA
gtaactcttgtctaggatc

SEQ ID NO: 36267 - DNA, 19 bp, synthetic construct
  source 1..19: mol_type = other DNA
tgtaactcttgtctaggat

SEQ ID NO: 36268 - DNA, 19 bp, synthetic construct
  source 1..19: mol_type = other DNA
atgtaactcttgtctagga

SEQ ID NO: 36269 - DNA, 19 bp, synthetic construct
  source 1..19: mol_type = other DNA
catgtaactcttgtctagg

SEQ ID NO: 36270 - DNA, 19 bp, synthetic construct
  source 1..19: mol_type = other DNA
tcatgtaactcttgtctag

SEQ ID NO: 36271 - DNA, 19 bp, synthetic construct
  source 1..19: mol_type = other DNA
gtcatgtaactcttgtcta

SEQ ID NO: 36272 - DNA, 19 bp, synthetic construct
  source 1..19: mol_type = other DNA
ggtcatgtaactcttgtct

SEQ ID NO: 36273 - DNA, 19 bp, synthetic construct
  source 1..19: mol_type = other DNA
aggtcatgtaactcttgtc

SEQ ID NO: 36274 - DNA, 19 bp, synthetic construct
  source 1..19: mol_type = other DNA
caggtcatgtaactcttgt

SEQ ID NO: 36275 - DNA, 19 bp, synthetic construct
  source 1..19: mol_type = other DNA
ccaggtcatgtaactcttg

SEQ ID NO: 36276 - DNA, 19 bp, synthetic construct
  source 1..19: mol_type = other DNA
cccaggtcatgtaactctt

SEQ ID NO: 36277 - DNA, 19 bp, synthetic construct
  source 1..19: mol_type = other DNA
acccaggtcatgtaactct

SEQ ID NO: 36278 - DNA, 19 bp, synthetic construct
  source 1..19: mol_type = other DNA
cacccaggtcatgtaactc

SEQ ID NO: 36279 - DNA, 19 bp, synthetic construct
  source 1..19: mol_type = other DNA
tcacccaggtcatgtaact

SEQ ID NO: 36280 - DNA, 19 bp, synthetic construct
  source 1..19: mol_type = other DNA
atcacccaggtcatgtaac

SEQ ID NO: 36281 - DNA, 19 bp, synthetic construct
  source 1..19: mol_type = other DNA
gatcacccaggtcatgtaa

SEQ ID NO: 36282 - DNA, 19 bp, synthetic construct
  source 1..19: mol_type = other DNA
tgatcacccaggtcatgta

SEQ ID NO: 36283 - DNA, 19 bp, synthetic construct
  source 1..19: mol_type = other DNA
ctgatcacccaggtcatgt

SEQ ID NO: 36284 - DNA, 19 bp, synthetic construct
  source 1..19: mol_type = other DNA
actgatcacccaggtcatg

SEQ ID NO: 36285 - DNA, 19 bp, synthetic construct
  source 1..19: mol_type = other DNA
cactgatcacccaggtcat

SEQ ID NO: 36286 - DNA, 19 bp, synthetic construct
  source 1..19: mol_type = other DNA
gcactgatcacccaggtca

SEQ ID NO: 36287 - DNA, 19 bp, synthetic construct
  source 1..19: mol_type = other DNA
tgcactgatcacccaggtc

SEQ ID NO: 36288 - DNA, 19 bp, synthetic construct
  source 1..19: mol_type = other DNA
taggtcatgtaactcttgt

SEQ ID NO: 36289 - DNA, 19 bp, synthetic construct
  source 1..19: mol_type = other DNA
ctaggtcatgtaactcttg

SEQ ID NO: 36290 - DNA, 19 bp, synthetic construct
  source 1..19: mol_type = other DNA
cctaggtcatgtaactctt

SEQ ID NO: 36291 - DNA, 19 bp, synthetic construct
  source 1..19: mol_type = other DNA
acctaggtcatgtaactct

SEQ ID NO: 36292 - DNA, 19 bp, synthetic construct
  source 1..19: mol_type = other DNA
cacctaggtcatgtaactc

SEQ ID NO: 36293 - DNA, 19 bp, synthetic construct
  source 1..19: mol_type = other DNA
tcacctaggtcatgtaact

SEQ ID NO: 36294 - DNA, 19 bp, synthetic construct
  source 1..19: mol_type = other DNA
atcacctaggtcatgtaac

SEQ ID NO: 36295 - DNA, 19 bp, synthetic construct
  source 1..19: mol_type = other DNA
gatcacctaggtcatgtaa

SEQ ID NO: 36296 - DNA, 19 bp, synthetic construct
  source 1..19: mol_type = other DNA
tgatcacctaggtcatgta

SEQ ID NO: 36297 - DNA, 19 bp, synthetic construct
  source 1..19: mol_type = other DNA
ctgatcacctaggtcatgt

SEQ ID NO: 36298 - DNA, 19 bp, synthetic construct
  source 1..19: mol_type = other DNA
actgatcacctaggtcatg

SEQ ID NO: 36299 - DNA, 19 bp, synthetic construct
  source 1..19: mol_type = other DNA
gatgtatctctgcactgat

SEQ ID NO: 36300 - DNA, 19 bp, synthetic construct
  source 1..19: mol_type = other DNA
cgatgtatctctgcactga

SEQ ID NO: 36301 - DNA, 19 bp, synthetic construct
  source 1..19: mol_type = other DNA
gcgatgtatctctgcactg

SEQ ID NO: 36302 - DNA, 19 bp, synthetic construct
  source 1..19: mol_type = other DNA
tgcgatgtatctctgcact

SEQ ID NO: 36303 - DNA, 19 bp, synthetic construct
  source 1..19: mol_type = other DNA
ttgcgatgtatctctgcac

SEQ ID NO: 36304 - DNA, 19 bp, synthetic construct
  source 1..19: mol_type = other DNA
attgcgatgtatctctgca

SEQ ID NO: 36305 - DNA, 19 bp, synthetic construct
  source 1..19: mol_type = other DNA
cattgcgatgtatctctgc

SEQ ID NO: 36306 - DNA, 19 bp, synthetic construct
  source 1..19: mol_type = other DNA
gcattgcgatgtatctctg

SEQ ID NO: 36307 - DNA, 19 bp, synthetic construct
  source 1..19: mol_type = other DNA
ggcattgcgatgtatctct

SEQ ID NO: 36308 - DNA, 19 bp, synthetic construct
  source 1..19: mol_type = other DNA
gggcattgcgatgtatctc

SEQ ID NO: 36309 - DNA, 19 bp, synthetic construct
  source 1..19: mol_type = other DNA
ggggcattgcgatgtatct

SEQ ID NO: 36310 - DNA, 19 bp, synthetic construct
  source 1..19: mol_type = other DNA
aggggcattgcgatgtatc

SEQ ID NO: 36311 - DNA, 19 bp, synthetic construct
  source 1..19: mol_type = other DNA
caggggcattgcgatgtat

SEQ ID NO: 36312 - DNA, 19 bp, synthetic construct
  source 1..19: mol_type = other DNA
acaggggcattgcgatgta

SEQ ID NO: 36313 - DNA, 19 bp, synthetic construct
  source 1..19: mol_type = other DNA
tacaggggcattgcgatgt

SEQ ID NO: 36314 - DNA, 19 bp, synthetic construct
  source 1..19: mol_type = other DNA
ctacaggggcattgcgatg

SEQ ID NO: 36315 - DNA, 19 bp, synthetic construct
  source 1..19: mol_type = other DNA
cctacaggggcattgcgat

SEQ ID NO: 36316 - DNA, 19 bp, synthetic construct
  source 1..19: mol_type = other DNA
gcctacaggggcattgcga

SEQ ID NO: 36317 - DNA, 19 bp, synthetic construct
  source 1..19: mol_type = other DNA
tgcctacaggggcattgcg

SEQ ID NO: 36318 - DNA, 19 bp, synthetic construct
  source 1..19: mol_type = other DNA
aaggctctgcctacagggg

SEQ ID NO: 36319 - DNA, 19 bp, synthetic construct
  source 1..19: mol_type = other DNA
caaggctctgcctacaggg

SEQ ID NO: 36320 - DNA, 19 bp, synthetic construct
  source 1..19: mol_type = other DNA
tcaaggctctgcctacagg

SEQ ID NO: 36321 - DNA, 19 bp, synthetic construct
  source 1..19: mol_type = other DNA
gtcaaggctctgcctacag

SEQ ID NO: 36322 - DNA, 19 bp, synthetic construct
  source 1..19: mol_type = other DNA
tgtcaaggctctgcctaca

SEQ ID NO: 36323 - DNA, 19 bp, synthetic construct
  source 1..19: mol_type = other DNA
ttgtcaaggctctgcctac

SEQ ID NO: 36324 - DNA, 19 bp, synthetic construct
  source 1..19: mol_type = other DNA
cttgtcaaggctctgccta

SEQ ID NO: 36325 - DNA, 19 bp, synthetic construct
  source 1..19: mol_type = other DNA
acttgtcaaggctctgcct

SEQ ID NO: 36326 - DNA, 19 bp, synthetic construct
  source 1..19: mol_type = other DNA
cacttgtcaaggctctgcc

SEQ ID NO: 36327 - DNA, 19 bp, synthetic construct
  source 1..19: mol_type = other DNA
ccacttgtcaaggctctgc

SEQ ID NO: 36328 - DNA, 19 bp, synthetic construct
  source 1..19: mol_type = other DNA
accacttgtcaaggctctg

SEQ ID NO: 36329 - DNA, 19 bp, synthetic construct
  source 1..19: mol_type = other DNA
taccacttgtcaaggctct

SEQ ID NO: 36330 - DNA, 19 bp, synthetic construct
  source 1..19: mol_type = other DNA
gtaccacttgtcaaggctc

SEQ ID NO: 36331 - DNA, 19 bp, synthetic construct
  source 1..19: mol_type = other DNA
tgtaccacttgtcaaggct

SEQ ID NO: 36332 - DNA, 19 bp, synthetic construct
  source 1..19: mol_type = other DNA
atgtaccacttgtcaaggc

SEQ ID NO: 36333 - DNA, 19 bp, synthetic construct
  source 1..19: mol_type = other DNA
gatgtaccacttgtcaagg

SEQ ID NO: 36334 - DNA, 19 bp, synthetic construct
  source 1..19: mol_type = other DNA
tgatgtaccacttgtcaag

SEQ ID NO: 36335 - DNA, 19 bp, synthetic construct
  source 1..19: mol_type = other DNA
gtgatgtaccacttgtcaa

SEQ ID NO: 36336 - DNA, 19 bp, synthetic construct
  source 1..19: mol_type = other DNA
ttacagggtgctttgtgac

SEQ ID NO: 36337 - DNA, 19 bp, synthetic construct
  source 1..19: mol_type = other DNA
cttacagggtgctttgtga

SEQ ID NO: 36338 - DNA, 19 bp, synthetic construct
  source 1..19: mol_type = other DNA
gcttacagggtgctttgtg

SEQ ID NO: 36339 - DNA, 19 bp, synthetic construct
  source 1..19: mol_type = other DNA
tgcttacagggtgctttgt

SEQ ID NO: 36340 - DNA, 19 bp, synthetic construct
  source 1..19: mol_type = other DNA
ctgcttacagggtgctttg

SEQ ID NO: 36341 - DNA, 19 bp, synthetic construct
  source 1..19: mol_type = other DNA
tctgcttacagggtgcttt

SEQ ID NO: 36342 - DNA, 19 bp, synthetic construct
  source 1..19: mol_type = other DNA
atctgcttacagggtgctt

SEQ ID NO: 36343 - DNA, 19 bp, synthetic construct
  source 1..19: mol_type = other DNA
gatctgcttacagggtgct

SEQ ID NO: 36344 - DNA, 19 bp, synthetic construct
  source 1..19: mol_type = other DNA
ggatctgcttacagggtgc

SEQ ID NO: 36345 - DNA, 19 bp, synthetic construct
  source 1..19: mol_type = other DNA
aggatctgcttacagggtg

SEQ ID NO: 36346 - DNA, 19 bp, synthetic construct
  source 1..19: mol_type = other DNA
taggatctgcttacagggt

SEQ ID NO: 36347 - DNA, 19 bp, synthetic construct
  source 1..19: mol_type = other DNA
ctaggatctgcttacaggg

SEQ ID NO: 36348 - DNA, 19 bp, synthetic construct
  source 1..19: mol_type = other DNA
tctaggatctgcttacagg

SEQ ID NO: 36349 - DNA, 19 bp, synthetic construct
  source 1..19: mol_type = other DNA
ctctaggatctgcttacag

SEQ ID NO: 36350 - DNA, 19 bp, synthetic construct
  source 1..19: mol_type = other DNA
tctctaggatctgcttaca

SEQ ID NO: 36351 - DNA, 19 bp, synthetic construct
  source 1..19: mol_type = other DNA
ttctctaggatctgcttac

SEQ ID NO: 36352 - DNA, 19 bp, synthetic construct
  source 1..19: mol_type = other DNA
cttctctaggatctgctta

SEQ ID NO: 36353 - DNA, 19 bp, synthetic construct
  source 1..19: mol_type = other DNA
tcttctctaggatctgctt

SEQ ID NO: 36354 - DNA, 19 bp, synthetic construct
  source 1..19: mol_type = other DNA
ctcttctctaggatctgct

SEQ ID NO: 36355 - DNA, 19 bp, synthetic construct
  source 1..19: mol_type = other DNA
actcttctctaggatctgc

SEQ ID NO: 36356 - DNA, 19 bp, synthetic construct
  source 1..19: mol_type = other DNA
aactcttctctaggatctg

SEQ ID NO: 36357 - DNA, 19 bp, synthetic construct
  source 1..19: mol_type = other DNA
taactcttctctaggatct

SEQ ID NO: 36358 - DNA, 19 bp, synthetic construct
  source 1..19: mol_type = other DNA
ataactcttctctaggatc

SEQ ID NO: 36359 - DNA, 19 bp, synthetic construct
  source 1..19: mol_type = other DNA
tataactcttctctaggat

SEQ ID NO: 36360 - DNA, 19 bp, synthetic construct
  source 1..19: mol_type = other DNA
atataactcttctctagga

SEQ ID NO: 36361 - DNA, 19 bp, synthetic construct
  source 1..19: mol_type = other DNA
gatataactcttctctagg

SEQ ID NO: 36362 - DNA, 19 bp, synthetic construct
  source 1..19: mol_type = other DNA
gtgatataactcttctcta

SEQ ID NO: 36363 - DNA, 19 bp, synthetic construct
  source 1..19: mol_type = other DNA
ggtgatataactcttctct

SEQ ID NO: 36364 - DNA, 19 bp, synthetic construct
  source 1..19: mol_type = other DNA
aggtgatataactcttctc

SEQ ID NO: 36365 - DNA, 19 bp, synthetic construct
  source 1..19: mol_type = other DNA
caggtgatataactcttct

SEQ ID NO: 36366 - DNA, 19 bp, synthetic construct
  source 1..19: mol_type = other DNA
ccaggtgatataactcttc

SEQ ID NO: 36367 - DNA, 19 bp, synthetic construct
  source 1..19: mol_type = other DNA
cccaggtgatataactctt

SEQ ID NO: 36368 - DNA, 19 bp, synthetic construct
  source 1..19: mol_type = other DNA
acccaggtgatataactct

SEQ ID NO: 36369 - DNA, 19 bp, synthetic construct
  source 1..19: mol_type = other DNA
cacccaggtgatataactc

SEQ ID NO: 36370 - DNA, 19 bp, synthetic construct
  source 1..19: mol_type = other DNA
tcacccaggtgatataact

SEQ ID NO: 36371 - DNA, 19 bp, synthetic construct
  source 1..19: mol_type = other DNA
atcacccaggtgatataac

SEQ ID NO: 36372 - DNA, 19 bp, synthetic construct
  source 1..19: mol_type = other DNA
gatcacccaggtgatataa

SEQ ID NO: 36373 - DNA, 19 bp, synthetic construct
  source 1..19: mol_type = other DNA
tgatcacccaggtgatata

SEQ ID NO: 36374 - DNA, 19 bp, synthetic construct
  source 1..19: mol_type = other DNA
ctgatcacccaggtgatat

SEQ ID NO: 36375 - DNA, 19 bp, synthetic construct
  source 1..19: mol_type = other DNA
actgatcacccaggtgata

SEQ ID NO: 36376 - DNA, 19 bp, synthetic construct
  source 1..19: mol_type = other DNA
cttgtgacatatctctgca

SEQ ID NO: 36377 - DNA, 19 bp, synthetic construct
  source 1..19: mol_type = other DNA
gcttgtgacatatctctgc

SEQ ID NO: 36378 - DNA, 19 bp, synthetic construct
  source 1..19: mol_type = other DNA
ggcttgtgacatatctctg

SEQ ID NO: 36379 - DNA, 19 bp, synthetic construct
  source 1..19: mol_type = other DNA
gggcttgtgacatatctct

SEQ ID NO: 36380 - DNA, 19 bp, synthetic construct
  source 1..19: mol_type = other DNA
ggggcttgtgacatatctc

SEQ ID NO: 36381 - DNA, 19 bp, synthetic construct
  source 1..19: mol_type = other DNA
gggggcttgtgacatatct

SEQ ID NO: 36382 - DNA, 19 bp, synthetic construct
  source 1..19: mol_type = other DNA
agggggcttgtgacatatc

SEQ ID NO: 36383 - DNA, 19 bp, synthetic construct
  source 1..19: mol_type = other DNA
cagggggcttgtgacatat

SEQ ID NO: 36384 - DNA, 19 bp, synthetic construct
  source 1..19: mol_type = other DNA
acagggggcttgtgacata

SEQ ID NO: 36385 - DNA, 19 bp, synthetic construct
  source 1..19: mol_type = other DNA
tacagggggcttgtgacat

SEQ ID NO: 36386 - DNA, 19 bp, synthetic construct
  source 1..19: mol_type = other DNA
ctacagggggcttgtgaca

SEQ ID NO: 36387 - DNA, 19 bp, synthetic construct
  source 1..19: mol_type = other DNA
cctacagggggcttgtgac

SEQ ID NO: 36388 - DNA, 19 bp, synthetic construct
  source 1..19: mol_type = other DNA
gatataactcttgtctagg

SEQ ID NO: 36389 - DNA, 19 bp, synthetic construct
  source 1..19: mol_type = other DNA
gtgatataactcttgtcta

SEQ ID NO: 36390 - DNA, 19 bp, synthetic construct
  source 1..19: mol_type = other DNA
ggtgatataactcttgtct

SEQ ID NO: 36391 - DNA, 19 bp, synthetic construct
  source 1..19: mol_type = other DNA
aggtgatataactcttgtc

SEQ ID NO: 36392 - DNA, 19 bp, synthetic construct
  source 1..19: mol_type = other DNA
caggtgatataactcttgt

SEQ ID NO: 36393 - DNA, 19 bp, synthetic construct
  source 1..19: mol_type = other DNA
ccaggtgatataactcttg

SEQ ID NO: 36394 - DNA, 19 bp, synthetic construct
  source 1..19: mol_type = other DNA
actgcactgatcacccagg

SEQ ID NO: 36395 - DNA, 19 bp, synthetic construct
  source 1..19: mol_type = other DNA
cactgcactgatcacccag

SEQ ID NO: 36396 - DNA, 19 bp, synthetic construct
  source 1..19: mol_type = other DNA
tcactgcactgatcaccca

SEQ ID NO: 36397 - DNA, 19 bp, synthetic construct
  source 1..19: mol_type = other DNA
atcactgcactgatcaccc

SEQ ID NO: 36398 - DNA, 19 bp, synthetic construct
  source 1..19: mol_type = other DNA
gtctaggctctggctacac

SEQ ID NO: 36399 - DNA, 19 bp, synthetic construct
  source 1..19: mol_type = other DNA
tcccaggtgctgtaacttt

SEQ ID NO: 36400 - DNA, 19 bp, synthetic construct
  source 1..19: mol_type = other DNA
ctcccaggtgctgtaactt

SEQ ID NO: 36401 - DNA, 19 bp, synthetic construct
  source 1..19: mol_type = other DNA
tctcccaggtgctgtaact

SEQ ID NO: 36402 - DNA, 19 bp, synthetic construct
  source 1..19: mol_type = other DNA
atctcccaggtgctgtaac

SEQ ID NO: 36403 - DNA, 19 bp, synthetic construct
  source 1..19: mol_type = other DNA
gatctcccaggtgctgtaa

SEQ ID NO: 36404 - DNA, 19 bp, synthetic construct
  source 1..19: mol_type = other DNA
tgatctcccaggtgctgta

SEQ ID NO: 36405 - DNA, 19 bp, synthetic construct
  source 1..19: mol_type = other DNA
actgatctcccaggtgctg

SEQ ID NO: 36406 - DNA, 19 bp, synthetic construct
  source 1..19: mol_type = other DNA
cactgatctcccaggtgct

SEQ ID NO: 36407 - DNA, 19 bp, synthetic construct
  source 1..19: mol_type = other DNA
tgcactgatctcccaggtg

SEQ ID NO: 36408 - DNA, 19 bp, synthetic construct
  source 1..19: mol_type = other DNA
ctgcactgatctcccaggt

SEQ ID NO: 36409 - DNA, 19 bp, synthetic construct
  source 1..19: mol_type = other DNA
tctgcactgatctcccagg

SEQ ID NO: 36410 - DNA, 19 bp, synthetic construct
  source 1..19: mol_type = other DNA
ctctgcactgatctcccag

SEQ ID NO: 36411 - DNA, 19 bp, synthetic construct
  source 1..19: mol_type = other DNA
tctctgcactgatctccca

SEQ ID NO: 36412 - DNA, 19 bp, synthetic construct
  source 1..19: mol_type = other DNA
atctctgcactgatctccc

SEQ ID NO: 36413 - DNA, 19 bp, synthetic construct
  source 1..19: mol_type = other DNA
tatctctgcactgatctcc

SEQ ID NO: 36414 - DNA, 19 bp, synthetic construct
  source 1..19: mol_type = other DNA
atatctctgcactgatctc

SEQ ID NO: 36415 - DNA, 19 bp, synthetic construct
  source 1..19: mol_type = other DNA
catatctctgcactgatct

SEQ ID NO: 36416 - DNA, 19 bp, synthetic construct
  source 1..19: mol_type = other DNA
tggggacattgtgacatat

SEQ ID NO: 36417 - DNA, 19 bp, synthetic construct
  source 1..19: mol_type = other DNA
ctggggacattgtgacata

SEQ ID NO: 36418 - DNA, 19 bp, synthetic construct
  source 1..19: mol_type = other DNA
actggggacattgtgacat

SEQ ID NO: 36419 - DNA, 19 bp, synthetic construct
  source 1..19: mol_type = other DNA
tactggggacattgtgaca

SEQ ID NO: 36420 - DNA, 19 bp, synthetic construct
  source 1..19: mol_type = other DNA
ctactggggacattgtgac

SEQ ID NO: 36421 - DNA, 19 bp, synthetic construct
  source 1..19: mol_type = other DNA
cctactggggacattgtga

SEQ ID NO: 36422 - DNA, 19 bp, synthetic construct
  source 1..19: mol_type = other DNA
gcctactggggacattgtg

SEQ ID NO: 36423 - DNA, 19 bp, synthetic construct
  source 1..19: mol_type = other DNA
tgcctactggggacattgt

SEQ ID NO: 36424 - DNA, 19 bp, synthetic construct
  source 1..19: mol_type = other DNA
ctgcctactggggacattg

SEQ ID NO: 36425 - DNA, 19 bp, synthetic construct
  source 1..19: mol_type = other DNA
tctgcctactggggacatt

SEQ ID NO: 36426 - DNA, 19 bp, synthetic construct
  source 1..19: mol_type = other DNA
ctctgcctactggggacat

SEQ ID NO: 36427 - DNA, 19 bp, synthetic construct
  source 1..19: mol_type = other DNA
tctctgcctactggggaca

SEQ ID NO: 36428 - DNA, 19 bp, synthetic construct
  source 1..19: mol_type = other DNA
aactcttgcctggtctctg

SEQ ID NO: 36429 - DNA, 19 bp, synthetic construct
  source 1..19: mol_type = other DNA
caactcttgcctggtctct

SEQ ID NO: 36430 - DNA, 19 bp, synthetic construct
  source 1..19: mol_type = other DNA
ccaactcttgcctggtctc

SEQ ID NO: 36431 - DNA, 19 bp, synthetic construct
  source 1..19: mol_type = other DNA
tccaactcttgcctggtct

SEQ ID NO: 36432 - DNA, 19 bp, synthetic construct
  source 1..19: mol_type = other DNA
atccaactcttgcctggtc

SEQ ID NO: 36433 - DNA, 19 bp, synthetic construct
  source 1..19: mol_type = other DNA
gatccaactcttgcctggt

SEQ ID NO: 36434 - DNA, 19 bp, synthetic construct
  source 1..19: mol_type = other DNA
tgatccaactcttgcctgg

SEQ ID NO: 36435 - DNA, 19 bp, synthetic construct
  source 1..19: mol_type = other DNA
gtgatccaactcttgcctg

SEQ ID NO: 36436 - DNA, 19 bp, synthetic construct
  source 1..19: mol_type = other DNA
ggtgatccaactcttgcct

SEQ ID NO: 36437 - DNA, 19 bp, synthetic construct
  source 1..19: mol_type = other DNA
aggtgatccaactcttgcc

SEQ ID NO: 36438 - DNA, 19 bp, synthetic construct
  source 1..19: mol_type = other DNA
gaggtgatccaactcttgc

SEQ ID NO: 36439 - DNA, 19 bp, synthetic construct
  source 1..19: mol_type = other DNA
cgaggtgatccaactcttg

SEQ ID NO: 36440 - DNA, 19 bp, synthetic construct
  source 1..19: mol_type = other DNA
ccgaggtgatccaactctt

SEQ ID NO: 36441 - DNA, 19 bp, synthetic construct
  source 1..19: mol_type = other DNA
cccgaggtgatccaactct

SEQ ID NO: 36442 - DNA, 19 bp, synthetic construct
  source 1..19: mol_type = other DNA
tcccgaggtgatccaactc

SEQ ID NO: 36443 - DNA, 19 bp, synthetic construct
  source 1..19: mol_type = other DNA
atcccgaggtgatccaact

SEQ ID NO: 36444 - DNA, 19 bp, synthetic construct
  source 1..19: mol_type = other DNA
gatcccgaggtgatccaac

SEQ ID NO: 36445 - DNA, 19 bp, synthetic construct
  source 1..19: mol_type = other DNA
tgatcccgaggtgatccaa

SEQ ID NO: 36446 - DNA, 19 bp, synthetic construct
  source 1..19: mol_type = other DNA
ctgatcccgaggtgatcca

SEQ ID NO: 36447 - DNA, 19 bp, synthetic construct
  source 1..19: mol_type = other DNA
actgatcccgaggtgatcc

SEQ ID NO: 36448 - DNA, 19 bp, synthetic construct
  source 1..19: mol_type = other DNA
cactgatcccgaggtgatc

SEQ ID NO: 36449 - DNA, 19 bp, synthetic construct
  source 1..19: mol_type = other DNA
gcactgatcccgaggtgat

SEQ ID NO: 36450 - DNA, 19 bp, synthetic construct
  source 1..19: mol_type = other DNA
tgcactgatcccgaggtga

SEQ ID NO: 36451 - DNA, 19 bp, synthetic construct
  source 1..19: mol_type = other DNA
ctgcactgatcccgaggtg

SEQ ID NO: 36452 - DNA, 19 bp, synthetic construct
  source 1..19: mol_type = other DNA
tctgcactgatcccgaggt

SEQ ID NO: 36453 - DNA, 19 bp, synthetic construct
  source 1..19: mol_type = other DNA
ctctgcactgatcccgagg

SEQ ID NO: 36454 - DNA, 19 bp, synthetic construct
  source 1..19: mol_type = other DNA
tctctgcactgatcccgag

SEQ ID NO: 36455 - DNA, 19 bp, synthetic construct
  source 1..19: mol_type = other DNA
atctctgcactgatcccga

SEQ ID NO: 36456 - DNA, 19 bp, synthetic construct
  source 1..19: mol_type = other DNA
tatctctgcactgatcccg

SEQ ID NO: 36457 - DNA, 19 bp, synthetic construct
  source 1..19: mol_type = other DNA
atatctctgcactgatccc

SEQ ID NO: 36458 - DNA, 19 bp, synthetic construct
  source 1..19: mol_type = other DNA
catatctctgcactgatcc

SEQ ID NO: 36459 - DNA, 19 bp, synthetic construct
  source 1..19: mol_type = other DNA
agacatatctctgcactga

SEQ ID NO: 36460 - DNA, 19 bp, synthetic construct
  source 1..19: mol_type = other DNA
gagacatatctctgcactg

SEQ ID NO: 36461 - DNA, 19 bp, synthetic construct
  source 1..19: mol_type = other DNA
tgagacatatctctgcact

SEQ ID NO: 36462 - DNA, 19 bp, synthetic construct
  source 1..19: mol_type = other DNA
ttgagacatatctctgcac

SEQ ID NO: 36463 - DNA, 19 bp, synthetic construct
  source 1..19: mol_type = other DNA
attgagacatatctctgca

SEQ ID NO: 36464 - DNA, 19 bp, synthetic construct
  source 1..19: mol_type = other DNA
gattgagacatatctctgc

SEQ ID NO: 36465 - DNA, 19 bp, synthetic construct
  source 1..19: mol_type = other DNA
ggattgagacatatctctg

SEQ ID NO: 36466 - DNA, 19 bp, synthetic construct
  source 1..19: mol_type = other DNA
gggattgagacatatctct

SEQ ID NO: 36467 - DNA, 19 bp, synthetic construct
  source 1..19: mol_type = other DNA
ggggattgagacatatctc

SEQ ID NO: 36468 - DNA, 19 bp, synthetic construct
  source 1..19: mol_type = other DNA
gggggattgagacatatct

SEQ ID NO: 36469 - DNA, 19 bp, synthetic construct
  source 1..19: mol_type = other DNA
agggggattgagacatatc

SEQ ID NO: 36470 - DNA, 19 bp, synthetic construct
  source 1..19: mol_type = other DNA
cagggggattgagacatat

SEQ ID NO: 36471 - DNA, 19 bp, synthetic construct
  source 1..19: mol_type = other DNA
acagggggattgagacata

SEQ ID NO: 36472 - DNA, 19 bp, synthetic construct
  source 1..19: mol_type = other DNA
cacagggggattgagacat

SEQ ID NO: 36473 - DNA, 19 bp, synthetic construct
  source 1..19: mol_type = other DNA
ccacagggggattgagaca

SEQ ID NO: 36474 - DNA, 19 bp, synthetic construct
  source 1..19: mol_type = other DNA
cccacagggggattgagac

SEQ ID NO: 36475 - DNA, 19 bp, synthetic construct
  source 1..19: mol_type = other DNA
gcccacagggggattgaga

SEQ ID NO: 36476 - DNA, 19 bp, synthetic construct
  source 1..19: mol_type = other DNA
tgcccacagggggattgag

SEQ ID NO: 36477 - DNA, 19 bp, synthetic construct
  source 1..19: mol_type = other DNA
tgtgcccacagggggattg

SEQ ID NO: 36478 - DNA, 19 bp, synthetic construct
  source 1..19: mol_type = other DNA
actcttgtctaggctgtgc

SEQ ID NO: 36479 - DNA, 19 bp, synthetic construct
  source 1..19: mol_type = other DNA
aactcttgtctaggctgtg

SEQ ID NO: 36480 - DNA, 19 bp, synthetic construct
  source 1..19: mol_type = other DNA
taactcttgtctaggctgt

SEQ ID NO: 36481 - DNA, 19 bp, synthetic construct
  source 1..19: mol_type = other DNA
cactgttaaccgaggtgat

SEQ ID NO: 36482 - DNA, 19 bp, synthetic construct
  source 1..19: mol_type = other DNA
gcactgttaaccgaggtga

SEQ ID NO: 36483 - DNA, 19 bp, synthetic construct
  source 1..19: mol_type = other DNA
tgcactgttaaccgaggtg

SEQ ID NO: 36484 - DNA, 19 bp, synthetic construct
  source 1..19: mol_type = other DNA
ctgcactgttaaccgaggt

SEQ ID NO: 36485 - DNA, 19 bp, synthetic construct
  source 1..19: mol_type = other DNA
tctgcactgttaaccgagg

SEQ ID NO: 36486 - DNA, 19 bp, synthetic construct
  source 1..19: mol_type = other DNA
ctctgcactgttaaccgag

SEQ ID NO: 36487 - DNA, 19 bp, synthetic construct
  source 1..19: mol_type = other DNA
tctctgcactgttaaccga

SEQ ID NO: 36488 - DNA, 19 bp, synthetic construct
  source 1..19: mol_type = other DNA
atctctgcactgttaaccg

SEQ ID NO: 36489 - DNA, 19 bp, synthetic construct
  source 1..19: mol_type = other DNA
tatctctgcactgttaacc

SEQ ID NO: 36490 - DNA, 19 bp, synthetic construct
  source 1..19: mol_type = other DNA
atatctctgcactgttaac

SEQ ID NO: 36491 - DNA, 19 bp, synthetic construct
  source 1..19: mol_type = other DNA
catatctctgcactgttaa

SEQ ID NO: 36492 - DNA, 19 bp, synthetic construct
  source 1..19: mol_type = other DNA
acatatctctgcactgtta

SEQ ID NO: 36493 - DNA, 19 bp, synthetic construct
  source 1..19: mol_type = other DNA
gacatatctctgcactgtt

SEQ ID NO: 36494 - DNA, 19 bp, synthetic construct
  source 1..19: mol_type = other DNA
tgacatatctctgcactgt

SEQ ID NO: 36495 - DNA, 19 bp, synthetic construct
  source 1..19: mol_type = other DNA
ttgacatatctctgcactg

SEQ ID NO: 36496 - DNA, 19 bp, synthetic construct
  source 1..19: mol_type = other DNA
tttgacatatctctgcact

SEQ ID NO: 36497 - DNA, 19 bp, synthetic construct
  source 1..19: mol_type = other DNA
ttttgacatatctctgcac

SEQ ID NO: 36498 - DNA, 19 bp, synthetic construct
  source 1..19: mol_type = other DNA
attttgacatatctctgca

SEQ ID NO: 36499 - DNA, 19 bp, synthetic construct
  source 1..19: mol_type = other DNA
cattttgacatatctctgc

SEQ ID NO: 36500 - DNA, 19 bp, synthetic construct
  source 1..19: mol_type = other DNA
gcattttgacatatctctg

SEQ ID NO: 36501 - DNA, 19 bp, synthetic construct
  source 1..19: mol_type = other DNA
ggcattttgacatatctct

SEQ ID NO: 36502 - DNA, 19 bp, synthetic construct
  source 1..19: mol_type = other DNA
gggcattttgacatatctc

SEQ ID NO: 36503 - DNA, 19 bp, synthetic construct
  source 1..19: mol_type = other DNA
ggggcattttgacatatct

SEQ ID NO: 36504 - DNA, 19 bp, synthetic construct
  source 1..19: mol_type = other DNA
aggggcattttgacatatc

SEQ ID NO: 36505 - DNA, 19 bp, synthetic construct
  source 1..19: mol_type = other DNA
caggggcattttgacatat

SEQ ID NO: 36506 - DNA, 19 bp, synthetic construct
  source 1..19: mol_type = other DNA
acaggggcattttgacata

SEQ ID NO: 36507 - DNA, 19 bp, synthetic construct
  source 1..19: mol_type = other DNA
tacaggggcattttgacat

SEQ ID NO: 36508 - DNA, 19 bp, synthetic construct
  source 1..19: mol_type = other DNA
ctacaggggcattttgaca

SEQ ID NO: 36509 - DNA, 19 bp, synthetic construct
  source 1..19: mol_type = other DNA
cctacaggggcattttgac

SEQ ID NO: 36510 - DNA, 19 bp, synthetic construct
  source 1..19: mol_type = other DNA
gcctacaggggcattttga

SEQ ID NO: 36511 - DNA, 19 bp, synthetic construct
  source 1..19: mol_type = other DNA
tgcctacaggggcattttg

SEQ ID NO: 36512 - DNA, 19 bp, synthetic construct
  source 1..19: mol_type = other DNA
ttgcctacaggggcatttt

SEQ ID NO: 36513 - DNA, 19 bp, synthetic construct
  source 1..19: mol_type = other DNA
cttgcctacaggggcattt

SEQ ID NO: 36514 - DNA, 19 bp, synthetic construct
  source 1..19: mol_type = other DNA
tgtaggcttgcctacaggg

SEQ ID NO: 36515 - DNA, 19 bp, synthetic construct
  source 1..19: mol_type = other DNA
gtgtaggcttgcctacagg

SEQ ID NO: 36516 - DNA, 19 bp, synthetic construct
  source 1..19: mol_type = other DNA
tgtgtaggcttgcctacag

SEQ ID NO: 36517 - DNA, 19 bp, synthetic construct
  source 1..19: mol_type = other DNA
ttgtgtaggcttgcctaca

SEQ ID NO: 36518 - DNA, 19 bp, synthetic construct
  source 1..19: mol_type = other DNA
cttgtgtaggcttgcctac

SEQ ID NO: 36519 - DNA, 19 bp, synthetic construct
  source 1..19: mol_type = other DNA
acttgtgtaggcttgccta

SEQ ID NO: 36520 - DNA, 19 bp, synthetic construct
  source 1..19: mol_type = other DNA
tacttgtgtaggcttgcct

SEQ ID NO: 36521 - DNA, 19 bp, synthetic construct
  source 1..19: mol_type = other DNA
atacttgtgtaggcttgcc

SEQ ID NO: 36522 - DNA, 19 bp, synthetic construct
  source 1..19: mol_type = other DNA
aatacttgtgtaggcttgc

SEQ ID NO: 36523 - DNA, 19 bp, synthetic construct
  source 1..19: mol_type = other DNA
taatacttgtgtaggcttg

SEQ ID NO: 36524 - DNA, 19 bp, synthetic construct
  source 1..19: mol_type = other DNA
gtaatacttgtgtaggctt

SEQ ID NO: 36525 - DNA, 19 bp, synthetic construct
  source 1..19: mol_type = other DNA
tgtaatacttgtgtaggct

SEQ ID NO: 36526 - DNA, 19 bp, synthetic construct
  source 1..19: mol_type = other DNA
atgtaatacttgtgtaggc

SEQ ID NO: 36527 - DNA, 19 bp, synthetic construct
  source 1..19: mol_type = other DNA
agtgatgtaatacttgtgt

SEQ ID NO: 36528 - DNA, 19 bp, synthetic construct
  source 1..19: mol_type = other DNA
gtattgtgacatatctctg

SEQ ID NO: 36529 - DNA, 19 bp, synthetic construct
  source 1..19: mol_type = other DNA
ggtattgtgacatatctct

SEQ ID NO: 36530 - DNA, 19 bp, synthetic construct
  source 1..19: mol_type = other DNA
gggtattgtgacatatctc

SEQ ID NO: 36531 - DNA, 19 bp, synthetic construct
  source 1..19: mol_type = other DNA
ggggtattgtgacatatct

SEQ ID NO: 36532 - DNA, 19 bp, synthetic construct
  source 1..19: mol_type = other DNA
gggggtattgtgacatatc

SEQ ID NO: 36533 - DNA, 19 bp, synthetic construct
  source 1..19: mol_type = other DNA
agggggtattgtgacatat

SEQ ID NO: 36534 - DNA, 19 bp, synthetic construct
  source 1..19: mol_type = other DNA
cagggggtattgtgacata

SEQ ID NO: 36535 - DNA, 19 bp, synthetic construct
  source 1..19: mol_type = other DNA
acagggggtattgtgacat

SEQ ID NO: 36536 - DNA, 19 bp, synthetic construct
  source 1..19: mol_type = other DNA
tacagggggtattgtgaca

SEQ ID NO: 36537 - DNA, 19 bp, synthetic construct
  source 1..19: mol_type = other DNA
ttacagggggtattgtgac

SEQ ID NO: 36538 - DNA, 19 bp, synthetic construct
  source 1..19: mol_type = other DNA
cttacagggggtattgtga

SEQ ID NO: 36539 - DNA, 19 bp, synthetic construct
  source 1..19: mol_type = other DNA
gcttacagggggtattgtg

SEQ ID NO: 36540 - DNA, 19 bp, synthetic construct
  source 1..19: mol_type = other DNA
tgcttacagggggtattgt

SEQ ID NO: 36541 - DNA, 19 bp, synthetic construct
  source 1..19: mol_type = other DNA
ctgcttacagggggtattg

SEQ ID NO: 36542 - DNA, 19 bp, synthetic construct
  source 1..19: mol_type = other DNA
tctgcttacagggggtatt

SEQ ID NO: 36543 - DNA, 19 bp, synthetic construct
  source 1..19: mol_type = other DNA
ctctgcttacagggggtat

SEQ ID NO: 36544 - DNA, 19 bp, synthetic construct
  source 1..19: mol_type = other DNA
gctctgcttacagggggta

SEQ ID NO: 36545 - DNA, 19 bp, synthetic construct
  source 1..19: mol_type = other DNA
taggctctgcttacagggg

SEQ ID NO: 36546 - DNA, 19 bp, synthetic construct
  source 1..19: mol_type = other DNA
ctaggctctgcttacaggg

SEQ ID NO: 36547 - DNA, 19 bp, synthetic construct
  source 1..19: mol_type = other DNA
tctaggctctgcttacagg

SEQ ID NO: 36548 - DNA, 19 bp, synthetic construct
  source 1..19: mol_type = other DNA
gtctaggctctgcttacag

SEQ ID NO: 36549 - DNA, 19 bp, synthetic construct
  source 1..19: mol_type = other DNA
tgtctaggctctgcttaca

SEQ ID NO: 36550 - DNA, 19 bp, synthetic construct
  source 1..19: mol_type = other DNA
ttgtctaggctctgcttac

SEQ ID NO: 36551 - DNA, 19 bp, synthetic construct
  source 1..19: mol_type = other DNA
cttgtctaggctctgctta

SEQ ID NO: 36552 - DNA, 19 bp, synthetic construct
  source 1..19: mol_type = other DNA
tcttgtctaggctctgctt

SEQ ID NO: 36553 - DNA, 19 bp, synthetic construct
  source 1..19: mol_type = other DNA
ctcttgtctaggctctgct

SEQ ID NO: 36554 - DNA, 19 bp, synthetic construct
  source 1..19: mol_type = other DNA
gtcacatatctctgcactg

SEQ ID NO: 36555 - DNA, 19 bp, synthetic construct
  source 1..19: mol_type = other DNA
tgtcacatatctctgcact

SEQ ID NO: 36556 - DNA, 19 bp, synthetic construct
  source 1..19: mol_type = other DNA
ttgtcacatatctctgcac

SEQ ID NO: 36557 - DNA, 19 bp, synthetic construct
  source 1..19: mol_type = other DNA
cttgtcacatatctctgca

SEQ ID NO: 36558 - DNA, 19 bp, synthetic construct
  source 1..19: mol_type = other DNA
ccttgtcacatatctctgc

SEQ ID NO: 36559 - DNA, 19 bp, synthetic construct
  source 1..19: mol_type = other DNA
gccttgtcacatatctctg

SEQ ID NO: 36560 - DNA, 19 bp, synthetic construct
  source 1..19: mol_type = other DNA
ggccttgtcacatatctct

SEQ ID NO: 36561 - DNA, 19 bp, synthetic construct
  source 1..19: mol_type = other DNA
gggccttgtcacatatctc

SEQ ID NO: 36562 - DNA, 19 bp, synthetic construct
  source 1..19: mol_type = other DNA
ggggccttgtcacatatct

SEQ ID NO: 36563 - DNA, 19 bp, synthetic construct
  source 1..19: mol_type = other DNA
aggggccttgtcacatatc

SEQ ID NO: 36564 - DNA, 19 bp, synthetic construct
  source 1..19: mol_type = other DNA
aaggggccttgtcacatat

SEQ ID NO: 36565 - DNA, 19 bp, synthetic construct
  source 1..19: mol_type = other DNA
tattgtctaggctctgctt

SEQ ID NO: 36566 - DNA, 19 bp, synthetic construct
  source 1..19: mol_type = other DNA
ctattgtctaggctctgct

SEQ ID NO: 36567 - DNA, 19 bp, synthetic construct
  source 1..19: mol_type = other DNA
actattgtctaggctctgc

SEQ ID NO: 36568 - DNA, 19 bp, synthetic construct
  source 1..19: mol_type = other DNA
aactattgtctaggctctg

SEQ ID NO: 36569 - DNA, 19 bp, synthetic construct
  source 1..19: mol_type = other DNA
taactattgtctaggctct

SEQ ID NO: 36570 - DNA, 19 bp, synthetic construct
  source 1..19: mol_type = other DNA
gtaactattgtctaggctc

SEQ ID NO: 36571 - DNA, 19 bp, synthetic construct
  source 1..19: mol_type = other DNA
ggtgatgtaactattgtct

SEQ ID NO: 36572 - DNA, 19 bp, synthetic construct
  source 1..19: mol_type = other DNA
aggtgatgtaactattgtc

SEQ ID NO: 36573 - DNA, 19 bp, synthetic construct
  source 1..19: mol_type = other DNA
caggtgatgtaactattgt

SEQ ID NO: 36574 - DNA, 19 bp, synthetic construct
  source 1..19: mol_type = other DNA
tcaggtgatgtaactattg

SEQ ID NO: 36575 - DNA, 19 bp, synthetic construct
  source 1..19: mol_type = other DNA
ctcaggtgatgtaactatt

SEQ ID NO: 36576 - DNA, 19 bp, synthetic construct
  source 1..19: mol_type = other DNA
actcaggtgatgtaactat

SEQ ID NO: 36577 - DNA, 19 bp, synthetic construct
  source 1..19: mol_type = other DNA
cactcaggtgatgtaacta

SEQ ID NO: 36578 - DNA, 19 bp, synthetic construct
  source 1..19: mol_type = other DNA
tcactcaggtgatgtaact

SEQ ID NO: 36579 - DNA, 19 bp, synthetic construct
  source 1..19: mol_type = other DNA
atcactcaggtgatgtaac

SEQ ID NO: 36580 - DNA, 19 bp, synthetic construct
  source 1..19: mol_type = other DNA
gatcactcaggtgatgtaa

SEQ ID NO: 36581 - DNA, 19 bp, synthetic construct
  source 1..19: mol_type = other DNA
tgatcactcaggtgatgta

SEQ ID NO: 36582 - DNA, 19 bp, synthetic construct
  source 1..19: mol_type = other DNA
ctgatcactcaggtgatgt

SEQ ID NO: 36583 - DNA, 19 bp, synthetic construct
  source 1..19: mol_type = other DNA
actgatcactcaggtgatg

SEQ ID NO: 36584 - DNA, 19 bp, synthetic construct
  source 1..19: mol_type = other DNA
cactgatcactcaggtgat

SEQ ID NO: 36585 - DNA, 19 bp, synthetic construct
  source 1..19: mol_type = other DNA
gcactgatcactcaggtga

SEQ ID NO: 36586 - DNA, 19 bp, synthetic construct
  source 1..19: mol_type = other DNA
tgcactgatcactcaggtg

SEQ ID NO: 36587 - DNA, 19 bp, synthetic construct
  source 1..19: mol_type = other DNA
ctgcactgatcactcaggt

SEQ ID NO: 36588 - DNA, 19 bp, synthetic construct
  source 1..19: mol_type = other DNA
tctgcactgatcactcagg

SEQ ID NO: 36589 - DNA, 19 bp, synthetic construct
  source 1..19: mol_type = other DNA
ctctgcactgatcactcag

SEQ ID NO: 36590 - DNA, 19 bp, synthetic construct
  source 1..19: mol_type = other DNA
tctctgcactgatcactca

SEQ ID NO: 36591 - DNA, 19 bp, synthetic construct
  source 1..19: mol_type = other DNA
atctctgcactgatcactc

SEQ ID NO: 36592 - DNA, 19 bp, synthetic construct
  source 1..19: mol_type = other DNA
gatctctgcactgatcact

SEQ ID NO: 36593 - DNA, 19 bp, synthetic construct
  source 1..19: mol_type = other DNA
agatctctgcactgatcac

SEQ ID NO: 36594 - DNA, 19 bp, synthetic construct
  source 1..19: mol_type = other DNA
cagatctctgcactgatca

SEQ ID NO: 36595 - DNA, 19 bp, synthetic construct
  source 1..19: mol_type = other DNA
acagatctctgcactgatc

SEQ ID NO: 36596 - DNA, 19 bp, synthetic construct
  source 1..19: mol_type = other DNA
gacagatctctgcactgat

SEQ ID NO: 36597 - DNA, 19 bp, synthetic construct
  source 1..19: mol_type = other DNA
tgacagatctctgcactga

SEQ ID NO: 36598 - DNA, 19 bp, synthetic construct
  source 1..19: mol_type = other DNA
gtgacagatctctgcactg

SEQ ID NO: 36599 - DNA, 19 bp, synthetic construct
  source 1..19: mol_type = other DNA
tgtgacagatctctgcact

SEQ ID NO: 36600 - DNA, 19 bp, synthetic construct
  source 1..19: mol_type = other DNA
ttgtgacagatctctgcac

SEQ ID NO: 36601 - DNA, 19 bp, synthetic construct
  source 1..19: mol_type = other DNA
attgtgacagatctctgca

SEQ ID NO: 36602 - DNA, 19 bp, synthetic construct
  source 1..19: mol_type = other DNA
cattgtgacagatctctgc

SEQ ID NO: 36603 - DNA, 19 bp, synthetic construct
  source 1..19: mol_type = other DNA
gcattgtgacagatctctg

SEQ ID NO: 36604 - DNA, 19 bp, synthetic construct
  source 1..19: mol_type = other DNA
aaggggcattgtgacagat

SEQ ID NO: 36605 - DNA, 19 bp, synthetic construct
  source 1..19: mol_type = other DNA
aaaggggcattgtgacaga

SEQ ID NO: 36606 - DNA, 19 bp, synthetic construct
  source 1..19: mol_type = other DNA
taaaggggcattgtgacag

SEQ ID NO: 36607 - DNA, 19 bp, synthetic construct
  source 1..19: mol_type = other DNA
ctaaaggggcattgtgaca

SEQ ID NO: 36608 - DNA, 19 bp, synthetic construct
  source 1..19: mol_type = other DNA
cctaaaggggcattgtgac

SEQ ID NO: 36609 - DNA, 19 bp, synthetic construct
  source 1..19: mol_type = other DNA
gcctaaaggggcattgtga

SEQ ID NO: 36610 - DNA, 19 bp, synthetic construct
  source 1..19: mol_type = other DNA
tgcctaaaggggcattgtg

SEQ ID NO: 36611 - DNA, 19 bp, synthetic construct
  source 1..19: mol_type = other DNA
ctgcctaaaggggcattgt

SEQ ID NO: 36612 - DNA, 19 bp, synthetic construct
  source 1..19: mol_type = other DNA
tctgcctaaaggggcattg

SEQ ID NO: 36613 - DNA, 19 bp, synthetic construct
  source 1..19: mol_type = other DNA
ctctgcctaaaggggcatt

SEQ ID NO: 36614 - DNA, 19 bp, synthetic construct
  source 1..19: mol_type = other DNA
gctctgcctaaaggggcat

SEQ ID NO: 36615 - DNA, 19 bp, synthetic construct
  source 1..19: mol_type = other DNA
agctctgcctaaaggggca

SEQ ID NO: 36616 - DNA, 19 bp, synthetic construct
  source 1..19: mol_type = other DNA
aagctctgcctaaaggggc

SEQ ID NO: 36617 - DNA, 19 bp, synthetic construct
  source 1..19: mol_type = other DNA
taagctctgcctaaagggg

SEQ ID NO: 36618 - DNA, 19 bp, synthetic construct
  source 1..19: mol_type = other DNA
ttaagctctgcctaaaggg

SEQ ID NO: 36619 - DNA, 19 bp, synthetic construct
  source 1..19: mol_type = other DNA
tttaagctctgcctaaagg

SEQ ID NO: 36620 - DNA, 19 bp, synthetic construct
  source 1..19: mol_type = other DNA
gtttaagctctgcctaaag

SEQ ID NO: 36621 - DNA, 19 bp, synthetic construct
  source 1..19: mol_type = other DNA
caggtgatgtaactctagt

SEQ ID NO: 36622 - DNA, 19 bp, synthetic construct
  source 1..19: mol_type = other DNA
actgatcacacaggtgatg

SEQ ID NO: 36623 - DNA, 19 bp, synthetic construct
  source 1..19: mol_type = other DNA
cactgatcacacaggtgat

SEQ ID NO: 36624 - DNA, 19 bp, synthetic construct
  source 1..19: mol_type = other DNA
acatatttctgcactgatc

SEQ ID NO: 36625 - DNA, 19 bp, synthetic construct
  source 1..19: mol_type = other DNA
ctaagctctgcctaaaggg

SEQ ID NO: 36626 - DNA, 19 bp, synthetic construct
  source 1..19: mol_type = other DNA
tctaagctctgcctaaagg

SEQ ID NO: 36627 - DNA, 19 bp, synthetic construct
  source 1..19: mol_type = other DNA
gtctaagctctgcctaaag

SEQ ID NO: 36628 - DNA, 19 bp, synthetic construct
  source 1..19: mol_type = other DNA
agtctaagctctgcctaaa

SEQ ID NO: 36629 - DNA, 19 bp, synthetic construct
  source 1..19: mol_type = other DNA
tagtctaagctctgcctaa

SEQ ID NO: 36630 - DNA, 19 bp, synthetic construct
  source 1..19: mol_type = other DNA
ctagtctaagctctgccta

SEQ ID NO: 36631 - DNA, 19 bp, synthetic construct
  source 1..19: mol_type = other DNA
tctagtctaagctctgcct

SEQ ID NO: 36632 - DNA, 19 bp, synthetic construct
  source 1..19: mol_type = other DNA
ctctagtctaagctctgcc

SEQ ID NO: 36633 - DNA, 19 bp, synthetic construct
  source 1..19: mol_type = other DNA
actctagtctaagctctgc

SEQ ID NO: 36634 - DNA, 19 bp, synthetic construct
  source 1..19: mol_type = other DNA
aactctagtctaagctctg

SEQ ID NO: 36635 - DNA, 19 bp, synthetic construct
  source 1..19: mol_type = other DNA
taactctagtctaagctct

SEQ ID NO: 36636 - DNA, 19 bp, synthetic construct
  source 1..19: mol_type = other DNA
gtaactctagtctaagctc

SEQ ID NO: 36637 - DNA, 19 bp, synthetic construct
  source 1..19: mol_type = other DNA
tgtaactctagtctaagct

SEQ ID NO: 36638 - DNA, 19 bp, synthetic construct
  source 1..19: mol_type = other DNA
atgtaactctagtctaagc

SEQ ID NO: 36639 - DNA, 19 bp, synthetic construct
  source 1..19: mol_type = other DNA
gtgatgtaactctagtcta

SEQ ID NO: 36640 - DNA, 19 bp, synthetic construct
  source 1..19: mol_type = other DNA
ggtgatgtaactctagtct

SEQ ID NO: 36641 - DNA, 19 bp, synthetic construct
  source 1..19: mol_type = other DNA
aggtgatgtaactctagtc

SEQ ID NO: 36642 - DNA, 19 bp, synthetic construct
  source 1..19: mol_type = other DNA
ccaggtgatgtaactctag

SEQ ID NO: 36643 - DNA, 19 bp, synthetic construct
  source 1..19: mol_type = other DNA
cccaggtgatgtaactcta

SEQ ID NO: 36644 - DNA, 19 bp, synthetic construct
  source 1..19: mol_type = other DNA
ggatttgcctatgggggca

SEQ ID NO: 36645 - DNA, 19 bp, synthetic construct
  source 1..19: mol_type = other DNA
tggatttgcctatgggggc

SEQ ID NO: 36646 - DNA, 19 bp, synthetic construct
  source 1..19: mol_type = other DNA
ttggatttgcctatggggg

SEQ ID NO: 36647 - DNA, 19 bp, synthetic construct
  source 1..19: mol_type = other DNA
cttggatttgcctatgggg

SEQ ID NO: 36648 - DNA, 19 bp, synthetic construct
  source 1..19: mol_type = other DNA
tcttggatttgcctatggg

SEQ ID NO: 36649 - DNA, 19 bp, synthetic construct
  source 1..19: mol_type = other DNA
gtcttggatttgcctatgg

SEQ ID NO: 36650 - DNA, 19 bp, synthetic construct
  source 1..19: mol_type = other DNA
tgtcttggatttgcctatg

SEQ ID NO: 36651 - DNA, 19 bp, synthetic construct
  source 1..19: mol_type = other DNA
ttgtcttggatttgcctat

SEQ ID NO: 36652 - DNA, 19 bp, synthetic construct
  source 1..19: mol_type = other DNA
cttgtcttggatttgccta

SEQ ID NO: 36653 - DNA, 19 bp, synthetic construct
  source 1..19: mol_type = other DNA
tcttgtcttggatttgcct

SEQ ID NO: 36654 - DNA, 19 bp, synthetic construct
  source 1..19: mol_type = other DNA
ctcttgtcttggatttgcc

SEQ ID NO: 36655 - DNA, 19 bp, synthetic construct
  source 1..19: mol_type = other DNA
actcttgtcttggatttgc

SEQ ID NO: 36656 - DNA, 19 bp, synthetic construct
  source 1..19: mol_type = other DNA
gactcttgtcttggatttg

SEQ ID NO: 36657 - DNA, 19 bp, synthetic construct
  source 1..19: mol_type = other DNA
agactcttgtcttggattt

SEQ ID NO: 36658 - DNA, 19 bp, synthetic construct
  source 1..19: mol_type = other DNA
cagactcttgtcttggatt

SEQ ID NO: 36659 - DNA, 19 bp, synthetic construct
  source 1..19: mol_type = other DNA
acagactcttgtcttggat

SEQ ID NO: 36660 - DNA, 19 bp, synthetic construct
  source 1..19: mol_type = other DNA
attgtgacatatttctgca

SEQ ID NO: 36661 - DNA, 19 bp, synthetic construct
  source 1..19: mol_type = other DNA
cattgtgacatatttctgc

SEQ ID NO: 36662 - DNA, 19 bp, synthetic construct
  source 1..19: mol_type = other DNA
gcattgtgacatatttctg

SEQ ID NO: 36663 - DNA, 19 bp, synthetic construct
  source 1..19: mol_type = other DNA
ggcattgtgacatatttct

SEQ ID NO: 36664 - DNA, 19 bp, synthetic construct
  source 1..19: mol_type = other DNA
gggcattgtgacatatttc

SEQ ID NO: 36665 - DNA, 19 bp, synthetic construct
  source 1..19: mol_type = other DNA
ggggcattgtgacatattt

SEQ ID NO: 36666 - DNA, 19 bp, synthetic construct
  source 1..19: mol_type = other DNA
gggggcattgtgacatatt

SEQ ID NO: 36667 - DNA, 19 bp, synthetic construct
  source 1..19: mol_type = other DNA
tgggggcattgtgacatat

SEQ ID NO: 36668 - DNA, 19 bp, synthetic construct
  source 1..19: mol_type = other DNA
gttggatctgcctatgggg

SEQ ID NO: 36669 - DNA, 19 bp, synthetic construct
  source 1..19: mol_type = other DNA
tgttggatctgcctatggg

SEQ ID NO: 36670 - DNA, 19 bp, synthetic construct
  source 1..19: mol_type = other DNA
gtgttggatctgcctatgg

SEQ ID NO: 36671 - DNA, 19 bp, synthetic construct
  source 1..19: mol_type = other DNA
tgtgttggatctgcctatg

SEQ ID NO: 36672 - DNA, 19 bp, synthetic construct
  source 1..19: mol_type = other DNA
ttgtgttggatctgcctat

SEQ ID NO: 36673 - DNA, 19 bp, synthetic construct
  source 1..19: mol_type = other DNA
cttgtgttggatctgccta

SEQ ID NO: 36674 - DNA, 19 bp, synthetic construct
  source 1..19: mol_type = other DNA
tcttgtgttggatctgcct

SEQ ID NO: 36675 - DNA, 19 bp, synthetic construct
  source 1..19: mol_type = other DNA
ctcttgtgttggatctgcc

SEQ ID NO: 36676 - DNA, 19 bp, synthetic construct
  source 1..19: mol_type = other DNA
actcttgtgttggatctgc

SEQ ID NO: 36677 - DNA, 19 bp, synthetic construct
  source 1..19: mol_type = other DNA
aactcttgtgttggatctg

SEQ ID NO: 36678 - DNA, 19 bp, synthetic construct
  source 1..19: mol_type = other DNA
taactcttgtgttggatct

SEQ ID NO: 36679 - DNA, 19 bp, synthetic construct
  source 1..19: mol_type = other DNA
gtaactcttgtgttggatc

SEQ ID NO: 36680 - DNA, 19 bp, synthetic construct
  source 1..19: mol_type = other DNA
tgtaactcttgtgttggat

SEQ ID NO: 36681 - DNA, 19 bp, synthetic construct
  source 1..19: mol_type = other DNA
atgtaactcttgtgttgga

SEQ ID NO: 36682 - DNA, 19 bp, synthetic construct
  source 1..19: mol_type = other DNA
gatgtaactcttgtgttgg

SEQ ID NO: 36683 - DNA, 19 bp, synthetic construct
  source 1..19: mol_type = other DNA
tgatgtaactcttgtgttg

SEQ ID NO: 36684 - DNA, 19 bp, synthetic construct
  source 1..19: mol_type = other DNA
gtgatgtaactcttgtgtt

SEQ ID NO: 36685 - DNA, 19 bp, synthetic construct
  source 1..19: mol_type = other DNA
ggtgatgtaactcttgtgt

SEQ ID NO: 36686 - DNA, 19 bp, synthetic construct
  source 1..19: mol_type = other DNA
aggtgatgtaactcttgtg

SEQ ID NO: 36687 - DNA, 19 bp, synthetic construct
  source 1..19: mol_type = other DNA
ttacatatctctgcactga

SEQ ID NO: 36688 - DNA, 19 bp, synthetic construct
  source 1..19: mol_type = other DNA
gttacatatctctgcactg

SEQ ID NO: 36689 - DNA, 19 bp, synthetic construct
  source 1..19: mol_type = other DNA
tgatcacacaggtgatgga

SEQ ID NO: 36690 - DNA, 19 bp, synthetic construct
  source 1..19: mol_type = other DNA
ctgatcacacaggtgatgg

SEQ ID NO: 36691 - DNA, 19 bp, synthetic construct
  source 1..19: mol_type = other DNA
acactgatcacacaggtga

SEQ ID NO: 36692 - DNA, 19 bp, synthetic construct
  source 1..19: mol_type = other DNA
tacactgatcacacaggtg

SEQ ID NO: 36693 - DNA, 19 bp, synthetic construct
  source 1..19: mol_type = other DNA
ctacactgatcacacaggt

SEQ ID NO: 36694 - DNA, 19 bp, synthetic construct
  source 1..19: mol_type = other DNA
tctacactgatcacacagg

SEQ ID NO: 36695 - DNA, 19 bp, synthetic construct
  source 1..19: mol_type = other DNA
ctctacactgatcacacag

SEQ ID NO: 36696 - DNA, 19 bp, synthetic construct
  source 1..19: mol_type = other DNA
tctctacactgatcacaca

SEQ ID NO: 36697 - DNA, 19 bp, synthetic construct
  source 1..19: mol_type = other DNA
atctctacactgatcacac

SEQ ID NO: 36698 - DNA, 19 bp, synthetic construct
  source 1..19: mol_type = other DNA
tatctctacactgatcaca

SEQ ID NO: 36699 - DNA, 19 bp, synthetic construct
  source 1..19: mol_type = other DNA
gcattgtgacatatctcta

SEQ ID NO: 36700 - DNA, 19 bp, synthetic construct
  source 1..19: mol_type = other DNA
aggcattgtgacatatctc

SEQ ID NO: 36701 - DNA, 19 bp, synthetic construct
  source 1..19: mol_type = other DNA
gaggcattgtgacatatct

SEQ ID NO: 36702 - DNA, 19 bp, synthetic construct
  source 1..19: mol_type = other DNA
ggaggcattgtgacatatc

SEQ ID NO: 36703 - DNA, 19 bp, synthetic construct
  source 1..19: mol_type = other DNA
aggaggcattgtgacatat

SEQ ID NO: 36704 - DNA, 19 bp, synthetic construct
  source 1..19: mol_type = other DNA
caggaggcattgtgacata

SEQ ID NO: 36705 - DNA, 19 bp, synthetic construct
  source 1..19: mol_type = other DNA
acaggaggcattgtgacat

SEQ ID NO: 36706 - DNA, 19 bp, synthetic construct
  source 1..19: mol_type = other DNA
tacaggaggcattgtgaca

SEQ ID NO: 36707 - DNA, 19 bp, synthetic construct
  source 1..19: mol_type = other DNA
ctacaggaggcattgtgac

SEQ ID NO: 36708 - DNA, 19 bp, synthetic construct
  source 1..19: mol_type = other DNA
cctacaggaggcattgtga

SEQ ID NO: 36709 - DNA, 19 bp, synthetic construct
  source 1..19: mol_type = other DNA
gcctacaggaggcattgtg

SEQ ID NO: 36710 - DNA, 19 bp, synthetic construct
  source 1..19: mol_type = other DNA
tgcctacaggaggcattgt

SEQ ID NO: 36711 - DNA, 19 bp, synthetic construct
  source 1..19: mol_type = other DNA
ctgcctacaggaggcattg

SEQ ID NO: 36712 - DNA, 19 bp, synthetic construct
  source 1..19: mol_type = other DNA
tctgcctacaggaggcatt

SEQ ID NO: 36713 - DNA, 19 bp, synthetic construct
  source 1..19: mol_type = other DNA
ctctgcctacaggaggcat

SEQ ID NO: 36714 - DNA, 19 bp, synthetic construct
  source 1..19: mol_type = other DNA
tagcctctgcctacaggag

SEQ ID NO: 36715 - DNA, 19 bp, synthetic construct
  source 1..19: mol_type = other DNA
ttagcctctgcctacagga

SEQ ID NO: 36716 - DNA, 19 bp, synthetic construct
  source 1..19: mol_type = other DNA
tttagcctctgcctacagg

SEQ ID NO: 36717 - DNA, 19 bp, synthetic construct
  source 1..19: mol_type = other DNA
gtttagcctctgcctacag

SEQ ID NO: 36718 - DNA, 19 bp, synthetic construct
  source 1..19: mol_type = other DNA
tgtttagcctctgcctaca

SEQ ID NO: 36719 - DNA, 19 bp, synthetic construct
  source 1..19: mol_type = other DNA
ttgtttagcctctgcctac

SEQ ID NO: 36720 - DNA, 19 bp, synthetic construct
  source 1..19: mol_type = other DNA
cttgtttagcctctgccta

SEQ ID NO: 36721 - DNA, 19 bp, synthetic construct
  source 1..19: mol_type = other DNA
tcttgtttagcctctgcct

SEQ ID NO: 36722 - DNA, 19 bp, synthetic construct
  source 1..19: mol_type = other DNA
ctcttgtttagcctctgcc

SEQ ID NO: 36723 - DNA, 19 bp, synthetic construct
  source 1..19: mol_type = other DNA
actcttgtttagcctctgc

SEQ ID NO: 36724 - DNA, 19 bp, synthetic construct
  source 1..19: mol_type = other DNA
aactcttgtttagcctctg

SEQ ID NO: 36725 - DNA, 19 bp, synthetic construct
  source 1..19: mol_type = other DNA
taactcttgtttagcctct

SEQ ID NO: 36726 - DNA, 19 bp, synthetic construct
  source 1..19: mol_type = other DNA
gtaactcttgtttagcctc

SEQ ID NO: 36727 - DNA, 19 bp, synthetic construct
  source 1..19: mol_type = other DNA
tgtaactcttgtttagcct

SEQ ID NO: 36728 - DNA, 19 bp, synthetic construct
  source 1..19: mol_type = other DNA
atgtaactcttgtttagcc

SEQ ID NO: 36729 - DNA, 19 bp, synthetic construct
  source 1..19: mol_type = other DNA
gatgtaactcttgtttagc

SEQ ID NO: 36730 - DNA, 19 bp, synthetic construct
  source 1..19: mol_type = other DNA
gtgatgtaactcttgttta

SEQ ID NO: 36731 - DNA, 19 bp, synthetic construct
  source 1..19: mol_type = other DNA
ggtgatgtaactcttgttt

SEQ ID NO: 36732 - DNA, 19 bp, synthetic construct
  source 1..19: mol_type = other DNA
aggtgatgtaactcttgtt

SEQ ID NO: 36733 - DNA, 19 bp, synthetic construct
  source 1..19: mol_type = other DNA
tccaggtgatgtaactctt

SEQ ID NO: 36734 - DNA, 19 bp, synthetic construct
  source 1..19: mol_type = other DNA
atccaggtgatgtaactct

SEQ ID NO: 36735 - DNA, 19 bp, synthetic construct
  source 1..19: mol_type = other DNA
aatccaggtgatgtaactc

SEQ ID NO: 36736 - DNA, 19 bp, synthetic construct
  source 1..19: mol_type = other DNA
aaatccaggtgatgtaact

SEQ ID NO: 36737 - DNA, 19 bp, synthetic construct
  source 1..19: mol_type = other DNA
acaaaatccaggtgatgta

SEQ ID NO: 36738 - DNA, 19 bp, synthetic construct
  source 1..19: mol_type = other DNA
gtgacatattgcaggaaac

SEQ ID NO: 36739 - DNA, 19 bp, synthetic construct
  source 1..19: mol_type = other DNA
ttgtgacatattgcaggaa

SEQ ID NO: 36740 - DNA, 19 bp, synthetic construct
  source 1..19: mol_type = other DNA
attgtgacatattgcagga

SEQ ID NO: 36741 - DNA, 19 bp, synthetic construct
  source 1..19: mol_type = other DNA
cattgtgacatattgcagg

SEQ ID NO: 36742 - DNA, 19 bp, synthetic construct
  source 1..19: mol_type = other DNA
ccattgtgacatattgcag

SEQ ID NO: 36743 - DNA, 19 bp, synthetic construct
  source 1..19: mol_type = other DNA
gccattgtgacatattgca

SEQ ID NO: 36744 - DNA, 19 bp, synthetic construct
  source 1..19: mol_type = other DNA
agcctaagcctaaccccta

SEQ ID NO: 36745 - DNA, 19 bp, synthetic construct
  source 1..19: mol_type = other DNA
aagcctaagcctaacccct

SEQ ID NO: 36746 - DNA, 19 bp, synthetic construct
  source 1..19: mol_type = other DNA
taagcctaagcctaacccc

SEQ ID NO: 36747 - DNA, 19 bp, synthetic construct
  source 1..19: mol_type = other DNA
ctaagcctaagcctaaccc

SEQ ID NO: 36748 - DNA, 19 bp, synthetic construct
  source 1..19: mol_type = other DNA
cctaagcctaagcctaacc

SEQ ID NO: 36749 - DNA, 19 bp, synthetic construct
  source 1..19: mol_type = other DNA
ccctaagcctaagcctaac

SEQ ID NO: 36750 - DNA, 19 bp, synthetic construct
  source 1..19: mol_type = other DNA
accctaagcctaagcctaa

SEQ ID NO: 36751 - DNA, 19 bp, synthetic construct
  source 1..19: mol_type = other DNA
aaccctaagcctaagccta

SEQ ID NO: 36752 - DNA, 19 bp, synthetic construct
  source 1..19: mol_type = other DNA
taaccctaagcctaagcct

SEQ ID NO: 36753 - DNA, 19 bp, synthetic construct
  source 1..19: mol_type = other DNA
ctaaccctaagcctaagcc

SEQ ID NO: 36754 - DNA, 19 bp, synthetic construct
  source 1..19: mol_type = other DNA
cctaaccctaagcctaagc

SEQ ID NO: 36755 - DNA, 19 bp, synthetic construct
  source 1..19: mol_type = other DNA
gcctaaccctaagcctaag

SEQ ID NO: 36756 - DNA, 19 bp, synthetic construct
  source 1..19: mol_type = other DNA
agcctaaccctaagcctaa

SEQ ID NO: 36757 - DNA, 19 bp, synthetic construct
  source 1..19: mol_type = other DNA
aagcctaaccctaagccta

SEQ ID NO: 36758 - DNA, 19 bp, synthetic construct
  source 1..19: mol_type = other DNA
taagcctaaccctaagcct

SEQ ID NO: 36759 - DNA, 19 bp, synthetic construct
  source 1..19: mol_type = other DNA
ctaagcctaaccctaagcc

SEQ ID NO: 36760 - DNA, 19 bp, synthetic construct
  source 1..19: mol_type = other DNA
cctaagcctaaccctaagc

SEQ ID NO: 36761 - DNA, 19 bp, synthetic construct
  source 1..19: mol_type = other DNA
gcctaagcctaaccctaag

SEQ ID NO: 36762 - DNA, 19 bp, synthetic construct
  source 1..19: mol_type = other DNA
agcctaagcctaaccctaa

SEQ ID NO: 36763 - DNA, 19 bp, synthetic construct
  source 1..19: mol_type = other DNA
aagcctaagcctaacccta

SEQ ID NO: 36764 - DNA, 19 bp, synthetic construct
  source 1..19: mol_type = other DNA
taagcctaagcctaaccct

SEQ ID NO: 36765 - DNA, 19 bp, synthetic construct
  source 1..19: mol_type = other DNA
taccctaagcctaagccta

SEQ ID NO: 36766 - DNA, 19 bp, synthetic construct
  source 1..19: mol_type = other DNA
ttaccctaagcctaagcct

SEQ ID NO: 36767 - DNA, 19 bp, synthetic construct
  source 1..19: mol_type = other DNA
cttaccctaagcctaagcc

SEQ ID NO: 36768 - DNA, 19 bp, synthetic construct
  source 1..19: mol_type = other DNA
ccttaccctaagcctaagc

SEQ ID NO: 36769 - DNA, 19 bp, synthetic construct
  source 1..19: mol_type = other DNA
gccttaccctaagcctaag

SEQ ID NO: 36770 - DNA, 19 bp, synthetic construct
  source 1..19: mol_type = other DNA
agccttaccctaagcctaa

SEQ ID NO: 36771 - DNA, 19 bp, synthetic construct
  source 1..19: mol_type = other DNA
aagccttaccctaagccta

SEQ ID NO: 36772 - DNA, 19 bp, synthetic construct
  source 1..19: mol_type = other DNA
taagccttaccctaagcct

SEQ ID NO: 36773 - DNA, 19 bp, synthetic construct
  source 1..19: mol_type = other DNA
ctaagccttaccctaagcc

SEQ ID NO: 36774 - DNA, 19 bp, synthetic construct
  source 1..19: mol_type = other DNA
cctaagccttaccctaagc

SEQ ID NO: 36775 - DNA, 19 bp, synthetic construct
  source 1..19: mol_type = other DNA
ccctaagccttaccctaag

SEQ ID NO: 36776 - DNA, 19 bp, synthetic construct
  source 1..19: mol_type = other DNA
accctaagccttaccctaa

SEQ ID NO: 36777 - DNA, 19 bp, synthetic construct
  source 1..19: mol_type = other DNA
aaccctaagccttacccta

SEQ ID NO: 36778 - DNA, 19 bp, synthetic construct
  source 1..19: mol_type = other DNA
gaaccctaagccttaccct

SEQ ID NO: 36779 - DNA, 19 bp, synthetic construct
  source 1..19: mol_type = other DNA
tgaaccctaagccttaccc

SEQ ID NO: 36780 - DNA, 19 bp, synthetic construct
  source 1..19: mol_type = other DNA
ctgaaccctaagccttacc

SEQ ID NO: 36781 - DNA, 19 bp, synthetic construct
  source 1..19: mol_type = other DNA
cctgaaccctaagccttac

SEQ ID NO: 36782 - DNA, 19 bp, synthetic construct
  source 1..19: mol_type = other DNA
atgtcttaatagcctatat

SEQ ID NO: 36783 - DNA, 19 bp, synthetic construct
  source 1..19: mol_type = other DNA
catgtcttaatagcctata

SEQ ID NO: 36784 - DNA, 19 bp, synthetic construct
  source 1..19: mol_type = other DNA
acatgtcttaatagcctat

SEQ ID NO: 36785 - DNA, 19 bp, synthetic construct
  source 1..19: mol_type = other DNA
aacatgtcttaatagccta

SEQ ID NO: 36786 - DNA, 19 bp, synthetic construct
  source 1..19: mol_type = other DNA
gccattctttgaagacaaa

SEQ ID NO: 36787 - DNA, 19 bp, synthetic construct
  source 1..19: mol_type = other DNA
ggccattctttgaagacaa

SEQ ID NO: 36788 - DNA, 19 bp, synthetic construct
  source 1..19: mol_type = other DNA
aggccattctttgaagaca

SEQ ID NO: 36789 - DNA, 19 bp, synthetic construct
  source 1..19: mol_type = other DNA
aaggccattctttgaagac

SEQ ID NO: 36790 - DNA, 19 bp, synthetic construct
  source 1..19: mol_type = other DNA
caaggccattctttgaaga

SEQ ID NO: 36791 - DNA, 19 bp, synthetic construct
  source 1..19: mol_type = other DNA
ccaaggccattctttgaag

SEQ ID NO: 36792 - DNA, 19 bp, synthetic construct
  source 1..19: mol_type = other DNA
accaaggccattctttgaa

SEQ ID NO: 36793 - DNA, 19 bp, synthetic construct
  source 1..19: mol_type = other DNA
aaccaaggccattctttga

SEQ ID NO: 36794 - DNA, 19 bp, synthetic construct
  source 1..19: mol_type = other DNA
aaaccaaggccattctttg

SEQ ID NO: 36795 - DNA, 19 bp, synthetic construct
  source 1..19: mol_type = other DNA
gaaaccaaggccattcttt

SEQ ID NO: 36796 - DNA, 19 bp, synthetic construct
  source 1..19: mol_type = other DNA
agaaaccaaggccattctt

SEQ ID NO: 36797 - DNA, 19 bp, synthetic construct
  source 1..19: mol_type = other DNA
cagaaaccaaggccattct

SEQ ID NO: 36798 - DNA, 19 bp, synthetic construct
  source 1..19: mol_type = other DNA
acagaaaccaaggccattc

SEQ ID NO: 36799 - DNA, 19 bp, synthetic construct
  source 1..19: mol_type = other DNA
cacagaaaccaaggccatt

SEQ ID NO: 36800 - DNA, 19 bp, synthetic construct
  source 1..19: mol_type = other DNA
ccacagaaaccaaggccat

SEQ ID NO: 36801 - DNA, 19 bp, synthetic construct
  source 1..19: mol_type = other DNA
tccacagaaaccaaggcca

SEQ ID NO: 36802 - DNA, 19 bp, synthetic construct
  source 1..19: mol_type = other DNA
gtccacagaaaccaaggcc

SEQ ID NO: 36803 - DNA, 19 bp, synthetic construct
  source 1..19: mol_type = other DNA
tgtccacagaaaccaaggc

SEQ ID NO: 36804 - DNA, 19 bp, synthetic construct
  source 1..19: mol_type = other DNA
ctgtccacagaaaccaagg

SEQ ID NO: 36805 - DNA, 19 bp, synthetic construct
  source 1..19: mol_type = other DNA
actgtccacagaaaccaag

SEQ ID NO: 36806 - DNA, 19 bp, synthetic construct
  source 1..19: mol_type = other DNA
aactgtccacagaaaccaa

SEQ ID NO: 36807 - DNA, 19 bp, synthetic construct
  source 1..19: mol_type = other DNA
aaactgtccacagaaacca

SEQ ID NO: 36808 - DNA, 19 bp, synthetic construct
  source 1..19: mol_type = other DNA
gaaactgtccacagaaacc

SEQ ID NO: 36809 - DNA, 19 bp, synthetic construct
  source 1..19: mol_type = other DNA
ggagaaactgtccacagaa

SEQ ID NO: 36810 - DNA, 19 bp, synthetic construct
  source 1..19: mol_type = other DNA
aggagaaactgtccacaga

SEQ ID NO: 36811 - DNA, 19 bp, synthetic construct
  source 1..19: mol_type = other DNA
gaggagaaactgtccacag

SEQ ID NO: 36812 - DNA, 19 bp, synthetic construct
  source 1..19: mol_type = other DNA
tgaggagaaactgtccaca

SEQ ID NO: 36813 - DNA, 19 bp, synthetic construct
  source 1..19: mol_type = other DNA
atgaggagaaactgtccac

SEQ ID NO: 36814 - DNA, 19 bp, synthetic construct
  source 1..19: mol_type = other DNA
catgaggagaaactgtcca

SEQ ID NO: 36815 - DNA, 19 bp, synthetic construct
  source 1..19: mol_type = other DNA
ccatgaggagaaactgtcc

SEQ ID NO: 36816 - DNA, 19 bp, synthetic construct
  source 1..19: mol_type = other DNA
tccatgaggagaaactgtc

SEQ ID NO: 36817 - DNA, 19 bp, synthetic construct
  source 1..19: mol_type = other DNA
ttccatgaggagaaactgt

SEQ ID NO: 36818 - DNA, 19 bp, synthetic construct
  source 1..19: mol_type = other DNA
tttccatgaggagaaactg

SEQ ID NO: 36819 - DNA, 19 bp, synthetic construct
  source 1..19: mol_type = other DNA
ctttccatgaggagaaact

SEQ ID NO: 36820 - DNA, 19 bp, synthetic construct
  source 1..19: mol_type = other DNA
cctttccatgaggagaaac

SEQ ID NO: 36821 - DNA, 19 bp, synthetic construct
  source 1..19: mol_type = other DNA
acctttccatgaggagaaa

SEQ ID NO: 36822 - DNA, 19 bp, synthetic construct
  source 1..19: mol_type = other DNA
tacctttccatgaggagaa

SEQ ID NO: 36823 - DNA, 19 bp, synthetic construct
  source 1..19: mol_type = other DNA
ctacctttccatgaggaga

SEQ ID NO: 36824 - DNA, 19 bp, synthetic construct
  source 1..19: mol_type = other DNA
actacctttccatgaggag

SEQ ID NO: 36825 - DNA, 19 bp, synthetic construct
  source 1..19: mol_type = other DNA
cactacctttccatgagga

SEQ ID NO: 36826 - DNA, 19 bp, synthetic construct
  source 1..19: mol_type = other DNA
acactacctttccatgagg

SEQ ID NO: 36827 - DNA, 19 bp, synthetic construct
  source 1..19: mol_type = other DNA
cacactacctttccatgag

SEQ ID NO: 36828 - DNA, 19 bp, synthetic construct
  source 1..19: mol_type = other DNA
acacactacctttccatga

SEQ ID NO: 36829 - DNA, 19 bp, synthetic construct
  source 1..19: mol_type = other DNA
aacacactacctttccatg

SEQ ID NO: 36830 - DNA, 19 bp, synthetic construct
  source 1..19: mol_type = other DNA
gaacacactacctttccat

SEQ ID NO: 36831 - DNA, 19 bp, synthetic construct
  source 1..19: mol_type = other DNA
ggaacacactacctttcca

SEQ ID NO: 36832 - DNA, 19 bp, synthetic construct
  source 1..19: mol_type = other DNA
aggaacacactacctttcc

SEQ ID NO: 36833 - DNA, 19 bp, synthetic construct
  source 1..19: mol_type = other DNA
caggaacacactacctttc

SEQ ID NO: 36834 - DNA, 19 bp, synthetic construct
  source 1..19: mol_type = other DNA
gcaggaacacactaccttt

SEQ ID NO: 36835 - DNA, 19 bp, synthetic construct
  source 1..19: mol_type = other DNA
agcaggaacacactacctt

SEQ ID NO: 36836 - DNA, 19 bp, synthetic construct
  source 1..19: mol_type = other DNA
tagcaggaacacactacct

SEQ ID NO: 36837 - DNA, 19 bp, synthetic construct
  source 1..19: mol_type = other DNA
ttagcaggaacacactacc

SEQ ID NO: 36838 - DNA, 19 bp, synthetic construct
  source 1..19: mol_type = other DNA
gttgtgatttgtatttagt

SEQ ID NO: 36839 - DNA, 19 bp, synthetic construct
  source 1..19: mol_type = other DNA
agagttgtgatttgtattt

SEQ ID NO: 36840 - DNA, 19 bp, synthetic construct
  source 1..19: mol_type = other DNA
gttgtgtgtgtaatgagaa

SEQ ID NO: 36841 - DNA, 19 bp, synthetic construct
  source 1..19: mol_type = other DNA
tgttgtgtgtgtaatgaga

SEQ ID NO: 36842 - DNA, 19 bp, synthetic construct
  source 1..19: mol_type = other DNA
ttgttgtgtgtgtaatgag

SEQ ID NO: 36843 - DNA, 19 bp, synthetic construct
  source 1..19: mol_type = other DNA
tttgttgtgtgtgtaatga

SEQ ID NO: 36844 - DNA, 19 bp, synthetic construct
  source 1..19: mol_type = other DNA
ttttgttgtgtgtgtaatg

SEQ ID NO: 36845 - DNA, 19 bp, synthetic construct
  source 1..19: mol_type = other DNA
attttgttgtgtgtgtaat

SEQ ID NO: 36846 - DNA, 19 bp, synthetic construct
  source 1..19: mol_type = other DNA
gctaaattttgttgtgtgt

SEQ ID NO: 36847 - DNA, 19 bp, synthetic construct
  source 1..19: mol_type = other DNA
cagctaaattttgttgtgt

SEQ ID NO: 36848 - DNA, 19 bp, synthetic construct
  source 1..19: mol_type = other DNA
ctcagctaaattttgttgt

SEQ ID NO: 36849 - DNA, 19 bp, synthetic construct
  source 1..19: mol_type = other DNA
cctcagctaaattttgttg

SEQ ID NO: 36850 - DNA, 19 bp, synthetic construct
  source 1..19: mol_type = other DNA
ccctcagctaaattttgtt

SEQ ID NO: 36851 - DNA, 19 bp, synthetic construct
  source 1..19: mol_type = other DNA
tccctcagctaaattttgt

SEQ ID NO: 36852 - DNA, 19 bp, synthetic construct
  source 1..19: mol_type = other DNA
ctccctcagctaaattttg

SEQ ID NO: 36853 - DNA, 19 bp, synthetic construct
  source 1..19: mol_type = other DNA
tctccctcagctaaatttt

SEQ ID NO: 36854 - DNA, 19 bp, synthetic construct
  source 1..19: mol_type = other DNA
atctccctcagctaaattt

SEQ ID NO: 36855 - DNA, 19 bp, synthetic construct
  source 1..19: mol_type = other DNA
aatctccctcagctaaatt

SEQ ID NO: 36856 - DNA, 19 bp, synthetic construct
  source 1..19: mol_type = other DNA
caatctccctcagctaaat

SEQ ID NO: 36857 - DNA, 19 bp, synthetic construct
  source 1..19: mol_type = other DNA
tcaatctccctcagctaaa

SEQ ID NO: 36858 - DNA, 19 bp, synthetic construct
  source 1..19: mol_type = other DNA
ctcaatctccctcagctaa

SEQ ID NO: 36859 - DNA, 19 bp, synthetic construct
  source 1..19: mol_type = other DNA
actcaatctccctcagcta

SEQ ID NO: 36860 - DNA, 19 bp, synthetic construct
  source 1..19: mol_type = other DNA
cactcaatctccctcagct

SEQ ID NO: 36861 - DNA, 19 bp, synthetic construct
  source 1..19: mol_type = other DNA
tcactcaatctccctcagc

SEQ ID NO: 36862 - DNA, 19 bp, synthetic construct
  source 1..19: mol_type = other DNA
gtcactcaatctccctcag

SEQ ID NO: 36863 - DNA, 19 bp, synthetic construct
  source 1..19: mol_type = other DNA
agtcactcaatctccctca

SEQ ID NO: 36864 - DNA, 19 bp, synthetic construct
  source 1..19: mol_type = other DNA
aagtcactcaatctccctc

SEQ ID NO: 36865 - DNA, 19 bp, synthetic construct
  source 1..19: mol_type = other DNA
aaagtcactcaatctccct

SEQ ID NO: 36866 - DNA, 19 bp, synthetic construct
  source 1..19: mol_type = other DNA
gaaagtcactcaatctccc

SEQ ID NO: 36867 - DNA, 19 bp, synthetic construct
  source 1..19: mol_type = other DNA
ggaaagtcactcaatctcc

SEQ ID NO: 36868 - DNA, 19 bp, synthetic construct
  source 1..19: mol_type = other DNA
gggaaagtcactcaatctc

SEQ ID NO: 36869 - DNA, 19 bp, synthetic construct
  source 1..19: mol_type = other DNA
tgggaaagtcactcaatct

SEQ ID NO: 36870 - DNA, 19 bp, synthetic construct
  source 1..19: mol_type = other DNA
ctgggaaagtcactcaatc

SEQ ID NO: 36871 - DNA, 19 bp, synthetic construct
  source 1..19: mol_type = other DNA
cctgggaaagtcactcaat

SEQ ID NO: 36872 - DNA, 19 bp, synthetic construct
  source 1..19: mol_type = other DNA
ccctgggaaagtcactcaa

SEQ ID NO: 36873 - DNA, 19 bp, synthetic construct
  source 1..19: mol_type = other DNA
accctgggaaagtcactca

SEQ ID NO: 36874 - DNA, 19 bp, synthetic construct
  source 1..19: mol_type = other DNA
gaccctgggaaagtcactc

SEQ ID NO: 36875 - DNA, 19 bp, synthetic construct
  source 1..19: mol_type = other DNA
tgaccctgggaaagtcact

SEQ ID NO: 36876 - DNA, 19 bp, synthetic construct
  source 1..19: mol_type = other DNA
gtgaccctgggaaagtcac

SEQ ID NO: 36877 - DNA, 19 bp, synthetic construct
  source 1..19: mol_type = other DNA
tgtgaccctgggaaagtca

SEQ ID NO: 36878 - DNA, 19 bp, synthetic construct
  source 1..19: mol_type = other DNA
gtgtgaccctgggaaagtc

SEQ ID NO: 36879 - DNA, 19 bp, synthetic construct
  source 1..19: mol_type = other DNA
tgtgtgaccctgggaaagt

SEQ ID NO: 36880 - DNA, 19 bp, synthetic construct
  source 1..19: mol_type = other DNA
ctgtgtgaccctgggaaag

SEQ ID NO: 36881 - DNA, 19 bp, synthetic construct
  source 1..19: mol_type = other DNA
gctgtgtgaccctgggaaa

SEQ ID NO: 36882 - DNA, 19 bp, synthetic construct
  source 1..19: mol_type = other DNA
agctgtgtgaccctgggaa

SEQ ID NO: 36883 - DNA, 19 bp, synthetic construct
  source 1..19: mol_type = other DNA
tagctgtgtgaccctggga

SEQ ID NO: 36884 - DNA, 19 bp, synthetic construct
  source 1..19: mol_type = other DNA
agtagctgtgtgaccctgg

SEQ ID NO: 36885 - DNA, 19 bp, synthetic construct
  source 1..19: mol_type = other DNA
tagtagctgtgtgaccctg

SEQ ID NO: 36886 - DNA, 19 bp, synthetic construct
  source 1..19: mol_type = other DNA
ttagtagctgtgtgaccct

SEQ ID NO: 36887 - DNA, 19 bp, synthetic construct
  source 1..19: mol_type = other DNA
attagtagctgtgtgaccc

SEQ ID NO: 36888 - DNA, 19 bp, synthetic construct
  source 1..19: mol_type = other DNA
tattagtagctgtgtgacc

SEQ ID NO: 36889 - DNA, 19 bp, synthetic construct
  source 1..19: mol_type = other DNA
ctattagtagctgtgtgac

SEQ ID NO: 36890 - DNA, 19 bp, synthetic construct
  source 1..19: mol_type = other DNA
gctattagtagctgtgtga

SEQ ID NO: 36891 - DNA, 19 bp, synthetic construct
  source 1..19: mol_type = other DNA
tgctattagtagctgtgtg

SEQ ID NO: 36892 - DNA, 19 bp, synthetic construct
  source 1..19: mol_type = other DNA
ctgctattagtagctgtgt

SEQ ID NO: 36893 - DNA, 19 bp, synthetic construct
  source 1..19: mol_type = other DNA
tctgctattagtagctgtg

SEQ ID NO: 36894 - DNA, 19 bp, synthetic construct
  source 1..19: mol_type = other DNA
ctctgctattagtagctgt

SEQ ID NO: 36895 - DNA, 19 bp, synthetic construct
  source 1..19: mol_type = other DNA
actctgctattagtagctg

SEQ ID NO: 36896 - DNA, 19 bp, synthetic construct
  source 1..19: mol_type = other DNA
tactctgctattagtagct

SEQ ID NO: 36897 - DNA, 19 bp, synthetic construct
  source 1..19: mol_type = other DNA
ctactctgctattagtagc

SEQ ID NO: 36898 - DNA, 19 bp, synthetic construct
  source 1..19: mol_type = other DNA
actactctgctattagtag

SEQ ID NO: 36899 - DNA, 19 bp, synthetic construct
  source 1..19: mol_type = other DNA
cactactctgctattagta

SEQ ID NO: 36900 - DNA, 19 bp, synthetic construct
  source 1..19: mol_type = other DNA
acactactctgctattagt

SEQ ID NO: 36901 - DNA, 19 bp, synthetic construct
  source 1..19: mol_type = other DNA
aacactactctgctattag

SEQ ID NO: 36902 - DNA, 19 bp, synthetic construct
  source 1..19: mol_type = other DNA
ctaaacactactctgctat

SEQ ID NO: 36903 - DNA, 19 bp, synthetic construct
  source 1..19: mol_type = other DNA
tctaaacactactctgcta

SEQ ID NO: 36904 - DNA, 19 bp, synthetic construct
  source 1..19: mol_type = other DNA
atctaaacactactctgct

SEQ ID NO: 36905 - DNA, 19 bp, synthetic construct
  source 1..19: mol_type = other DNA
gtattcccatatgaatcta

SEQ ID NO: 36906 - DNA, 19 bp, synthetic construct
  source 1..19: mol_type = other DNA
agtattcccatatgaatct

SEQ ID NO: 36907 - DNA, 19 bp, synthetic construct
  source 1..19: mol_type = other DNA
cagtattcccatatgaatc

SEQ ID NO: 36908 - DNA, 19 bp, synthetic construct
  source 1..19: mol_type = other DNA
tcagtattcccatatgaat

SEQ ID NO: 36909 - DNA, 19 bp, synthetic construct
  source 1..19: mol_type = other DNA
ttcagtattcccatatgaa

SEQ ID NO: 36910 - DNA, 19 bp, synthetic construct
  source 1..19: mol_type = other DNA
gttcagtattcccatatga

SEQ ID NO: 36911 - DNA, 19 bp, synthetic construct
  source 1..19: mol_type = other DNA
tgttcagtattcccatatg

SEQ ID NO: 36912 - DNA, 19 bp, synthetic construct
  source 1..19: mol_type = other DNA
gtgttcagtattcccatat

SEQ ID NO: 36913 - DNA, 19 bp, synthetic construct
  source 1..19: mol_type = other DNA
tgtgttcagtattcccata

SEQ ID NO: 36914 - DNA, 19 bp, synthetic construct
  source 1..19: mol_type = other DNA
ctgtgttcagtattcccat

SEQ ID NO: 36915 - DNA, 19 bp, synthetic construct
  source 1..19: mol_type = other DNA
tctgtgttcagtattccca

SEQ ID NO: 36916 - DNA, 19 bp, synthetic construct
  source 1..19: mol_type = other DNA
ttctgtgttcagtattccc

SEQ ID NO: 36917 - DNA, 19 bp, synthetic construct
  source 1..19: mol_type = other DNA
tttctgtgttcagtattcc

SEQ ID NO: 36918 - DNA, 19 bp, synthetic construct
  source 1..19: mol_type = other DNA
atttctgtgttcagtattc

SEQ ID NO: 36919 - DNA, 19 bp, synthetic construct
  source 1..19: mol_type = other DNA
catttctgtgttcagtatt

SEQ ID NO: 36920 - DNA, 19 bp, synthetic construct
  source 1..19: mol_type = other DNA
tcatttctgtgttcagtat

SEQ ID NO: 36921 - DNA, 19 bp, synthetic construct
  source 1..19: mol_type = other DNA
ttcatttctgtgttcagta

SEQ ID NO: 36922 - DNA, 19 bp, synthetic construct
  source 1..19: mol_type = other DNA
gttcatttctgtgttcagt

SEQ ID NO: 36923 - DNA, 19 bp, synthetic construct
  source 1..19: mol_type = other DNA
ggttcatttctgtgttcag

SEQ ID NO: 36924 - DNA, 19 bp, synthetic construct
  source 1..19: mol_type = other DNA
tggttcatttctgtgttca

SEQ ID NO: 36925 - DNA, 19 bp, synthetic construct
  source 1..19: mol_type = other DNA
ttggttcatttctgtgttc

SEQ ID NO: 36926 - DNA, 19 bp, synthetic construct
  source 1..19: mol_type = other DNA
attggttcatttctgtgtt

SEQ ID NO: 36927 - DNA, 19 bp, synthetic construct
  source 1..19: mol_type = other DNA
cattggttcatttctgtgt

SEQ ID NO: 36928 - DNA, 19 bp, synthetic construct
  source 1..19: mol_type = other DNA
ccattggttcatttctgtg

SEQ ID NO: 36929 - DNA, 19 bp, synthetic construct
  source 1..19: mol_type = other DNA
tccattggttcatttctgt

SEQ ID NO: 36930 - DNA, 19 bp, synthetic construct
  source 1..19: mol_type = other DNA
ttccattggttcatttctg

SEQ ID NO: 36931 - DNA, 19 bp, synthetic construct
  source 1..19: mol_type = other DNA
tttccattggttcatttct

SEQ ID NO: 36932 - DNA, 19 bp, synthetic construct
  source 1..19: mol_type = other DNA
gtttccattggttcatttc

SEQ ID NO: 36933 - DNA, 19 bp, synthetic construct
  source 1..19: mol_type = other DNA
tgtttccattggttcattt

SEQ ID NO: 36934 - DNA, 19 bp, synthetic construct
  source 1..19: mol_type = other DNA
atgtttccattggttcatt

SEQ ID NO: 36935 - DNA, 19 bp, synthetic construct
  source 1..19: mol_type = other DNA
gatgtttccattggttcat

SEQ ID NO: 36936 - DNA, 19 bp, synthetic construct
  source 1..19: mol_type = other DNA
ggatgtttccattggttca

SEQ ID NO: 36937 - DNA, 19 bp, synthetic construct
  source 1..19: mol_type = other DNA
aggatgtttccattggttc

SEQ ID NO: 36938 - DNA, 19 bp, synthetic construct
  source 1..19: mol_type = other DNA
taggatgtttccattggtt

SEQ ID NO: 36939 - DNA, 19 bp, synthetic construct
  source 1..19: mol_type = other DNA
gtaggatgtttccattggt

SEQ ID NO: 36940 - DNA, 19 bp, synthetic construct
  source 1..19: mol_type = other DNA
cgtaggatgtttccattgg

SEQ ID NO: 36941 - DNA, 19 bp, synthetic construct
  source 1..19: mol_type = other DNA
acgtaggatgtttccattg

SEQ ID NO: 36942 - DNA, 19 bp, synthetic construct
  source 1..19: mol_type = other DNA
aacgtaggatgtttccatt

SEQ ID NO: 36943 - DNA, 19 bp, synthetic construct
  source 1..19: mol_type = other DNA
gaacgtaggatgtttccat

SEQ ID NO: 36944 - DNA, 19 bp, synthetic construct
  source 1..19: mol_type = other DNA
ggaacgtaggatgtttcca

SEQ ID NO: 36945 - DNA, 19 bp, synthetic construct
  source 1..19: mol_type = other DNA
tggaacgtaggatgtttcc

SEQ ID NO: 36946 - DNA, 19 bp, synthetic construct
  source 1..19: mol_type = other DNA
ttggaacgtaggatgtttc

SEQ ID NO: 36947 - DNA, 19 bp, synthetic construct
  source 1..19: mol_type = other DNA
tttggaacgtaggatgttt

SEQ ID NO: 36948 - DNA, 19 bp, synthetic construct
  source 1..19: mol_type = other DNA
ttttggaacgtaggatgtt

SEQ ID NO: 36949 - DNA, 19 bp, synthetic construct
  source 1..19: mol_type = other DNA
cttttggaacgtaggatgt

SEQ ID NO: 36950 - DNA, 19 bp, synthetic construct
  source 1..19: mol_type = other DNA
gcttttggaacgtaggatg

SEQ ID NO: 36951 - DNA, 19 bp, synthetic construct
  source 1..19: mol_type = other DNA
ggcttttggaacgtaggat

SEQ ID NO: 36952 - DNA, 19 bp, synthetic construct
  source 1..19: mol_type = other DNA
aggcttttggaacgtagga

SEQ ID NO: 36953 - DNA, 19 bp, synthetic construct
  source 1..19: mol_type = other DNA
taggcttttggaacgtagg

SEQ ID NO: 36954 - DNA, 19 bp, synthetic construct
  source 1..19: mol_type = other DNA
gtaggcttttggaacgtag

SEQ ID NO: 36955 - DNA, 19 bp, synthetic construct
  source 1..19: mol_type = other DNA
agtaggcttttggaacgta

SEQ ID NO: 36956 - DNA, 19 bp, synthetic construct
  source 1..19: mol_type = other DNA
gagtaggcttttggaacgt

SEQ ID NO: 36957 - DNA, 19 bp, synthetic construct
  source 1..19: mol_type = other DNA
tgagtaggcttttggaacg

SEQ ID NO: 36958 - DNA, 19 bp, synthetic construct
  source 1..19: mol_type = other DNA
ttgagtaggcttttggaac

SEQ ID NO: 36959 - DNA, 19 bp, synthetic construct
  source 1..19: mol_type = other DNA
cttgagtaggcttttggaa

SEQ ID NO: 36960 - DNA, 19 bp, synthetic construct
  source 1..19: mol_type = other DNA
gcttgagtaggcttttgga

SEQ ID NO: 36961 - DNA, 19 bp, synthetic construct
  source 1..19: mol_type = other DNA
ggcttgagtaggcttttgg

SEQ ID NO: 36962 - DNA, 19 bp, synthetic construct
  source 1..19: mol_type = other DNA
tggcttgagtaggcttttg

SEQ ID NO: 36963 - DNA, 19 bp, synthetic construct
  source 1..19: mol_type = other DNA
atggcttgagtaggctttt

SEQ ID NO: 36964 - DNA, 19 bp, synthetic construct
  source 1..19: mol_type = other DNA
aatggcttgagtaggcttt

SEQ ID NO: 36965 - DNA, 19 bp, synthetic construct
  source 1..19: mol_type = other DNA
aaatggcttgagtaggctt

SEQ ID NO: 36966 - DNA, 19 bp, synthetic construct
  source 1..19: mol_type = other DNA
caaatggcttgagtaggct

SEQ ID NO: 36967 - DNA, 19 bp, synthetic construct
  source 1..19: mol_type = other DNA
acaaatggcttgagtaggc

SEQ ID NO: 36968 - DNA, 19 bp, synthetic construct
  source 1..19: mol_type = other DNA
aacaaatggcttgagtagg

SEQ ID NO: 36969 - DNA, 19 bp, synthetic construct
  source 1..19: mol_type = other DNA
ccattcataagtatttgga

SEQ ID NO: 36970 - DNA, 19 bp, synthetic construct
  source 1..19: mol_type = other DNA
gccattcataagtatttgg

SEQ ID NO: 36971 - DNA, 19 bp, synthetic construct
  source 1..19: mol_type = other DNA
tgccattcataagtatttg

SEQ ID NO: 36972 - DNA, 19 bp, synthetic construct
  source 1..19: mol_type = other DNA
ctgccattcataagtattt

SEQ ID NO: 36973 - DNA, 19 bp, synthetic construct
  source 1..19: mol_type = other DNA
tctgccattcataagtatt

SEQ ID NO: 36974 - DNA, 19 bp, synthetic construct
  source 1..19: mol_type = other DNA
ctctgccattcataagtat

SEQ ID NO: 36975 - DNA, 19 bp, synthetic construct
  source 1..19: mol_type = other DNA
tctctgccattcataagta

SEQ ID NO: 36976 - DNA, 19 bp, synthetic construct
  source 1..19: mol_type = other DNA
atctctgccattcataagt

SEQ ID NO: 36977 - DNA, 19 bp, synthetic construct
  source 1..19: mol_type = other DNA
gatctctgccattcataag

SEQ ID NO: 36978 - DNA, 19 bp, synthetic construct
  source 1..19: mol_type = other DNA
agatctctgccattcataa

SEQ ID NO: 36979 - DNA, 19 bp, synthetic construct
  source 1..19: mol_type = other DNA
tagatctctgccattcata

SEQ ID NO: 36980 - DNA, 19 bp, synthetic construct
  source 1..19: mol_type = other DNA
gtagatctctgccattcat

SEQ ID NO: 36981 - DNA, 19 bp, synthetic construct
  source 1..19: mol_type = other DNA
tgtagatctctgccattca

SEQ ID NO: 36982 - DNA, 19 bp, synthetic construct
  source 1..19: mol_type = other DNA
ctgtagatctctgccattc

SEQ ID NO: 36983 - DNA, 19 bp, synthetic construct
  source 1..19: mol_type = other DNA
tctgtagatctctgccatt

SEQ ID NO: 36984 - DNA, 19 bp, synthetic construct
  source 1..19: mol_type = other DNA
atctgtagatctctgccat

SEQ ID NO: 36985 - DNA, 19 bp, synthetic construct
  source 1..19: mol_type = other DNA
aatctgtagatctctgcca

SEQ ID NO: 36986 - DNA, 19 bp, synthetic construct
  source 1..19: mol_type = other DNA
aaatctgtagatctctgcc

SEQ ID NO: 36987 - DNA, 19 bp, synthetic construct
  source 1..19: mol_type = other DNA
caaatctgtagatctctgc

SEQ ID NO: 36988 - DNA, 19 bp, synthetic construct
  source 1..19: mol_type = other DNA
tcaaatctgtagatctctg

SEQ ID NO: 36989 - DNA, 19 bp, synthetic construct
  source 1..19: mol_type = other DNA
atcaaatctgtagatctct

SEQ ID NO: 36990 - DNA, 19 bp, synthetic construct
  source 1..19: mol_type = other DNA
catcatttcttacatcaga

SEQ ID NO: 36991 - DNA, 19 bp, synthetic construct
  source 1..19: mol_type = other DNA
gcatcatttcttacatcag

SEQ ID NO: 36992 - DNA, 19 bp, synthetic construct
  source 1..19: mol_type = other DNA
agcatcatttcttacatca

SEQ ID NO: 36993 - DNA, 19 bp, synthetic construct
  source 1..19: mol_type = other DNA
gagcatcatttcttacatc

SEQ ID NO: 36994 - DNA, 19 bp, synthetic construct
  source 1..19: mol_type = other DNA
tgagcatcatttcttacat

SEQ ID NO: 36995 - DNA, 19 bp, synthetic construct
  source 1..19: mol_type = other DNA
gtgagcatcatttcttaca

SEQ ID NO: 36996 - DNA, 19 bp, synthetic construct
  source 1..19: mol_type = other DNA
ggtgagcatcatttcttac

SEQ ID NO: 36997 - DNA, 19 bp, synthetic construct
  source 1..19: mol_type = other DNA
tggtgagcatcatttctta

SEQ ID NO: 36998 - DNA, 19 bp, synthetic construct
  source 1..19: mol_type = other DNA
ctggtgagcatcatttctt

SEQ ID NO: 36999 - DNA, 19 bp, synthetic construct
  source 1..19: mol_type = other DNA
gctggtgagcatcatttct

SEQ ID NO: 37000 - DNA, 19 bp, synthetic construct
  source 1..19: mol_type = other DNA
agctggtgagcatcatttc

SEQ ID NO: 37001 - DNA, 19 bp, synthetic construct
  source 1..19: mol_type = other DNA
cagctggtgagcatcattt

SEQ ID NO: 37002 - DNA, 19 bp, synthetic construct
  source 1..19: mol_type = other DNA
ccagctggtgagcatcatt

SEQ ID NO: 37003 - DNA, 19 bp, synthetic construct
  source 1..19: mol_type = other DNA
ttgtggggtggtagcagta

SEQ ID NO: 37004 - DNA, 19 bp, synthetic construct
  source 1..19: mol_type = other DNA
gacatttgtccagtatgct

SEQ ID NO: 37005 - DNA, 19 bp, synthetic construct
  source 1..19: mol_type = other DNA
agacatttgtccagtatgc

SEQ ID NO: 37006 - DNA, 19 bp, synthetic construct
  source 1..19: mol_type = other DNA
tagacatttgtccagtatg

SEQ ID NO: 37007 - DNA, 19 bp, synthetic construct
  source 1..19: mol_type = other DNA
ttagacatttgtccagtat

SEQ ID NO: 37008 - DNA, 19 bp, synthetic construct
  source 1..19: mol_type = other DNA
cttagacatttgtccagta

SEQ ID NO: 37009 - DNA, 19 bp, synthetic construct
  source 1..19: mol_type = other DNA
gcttagacatttgtccagt

SEQ ID NO: 37010 - DNA, 19 bp, synthetic construct
  source 1..19: mol_type = other DNA
ggcttagacatttgtccag

SEQ ID NO: 37011 - DNA, 19 bp, synthetic construct
  source 1..19: mol_type = other DNA
aggcttagacatttgtcca

SEQ ID NO: 37012 - DNA, 19 bp, synthetic construct
  source 1..19: mol_type = other DNA
gaggcttagacatttgtcc

SEQ ID NO: 37013 - DNA, 19 bp, synthetic construct
  source 1..19: mol_type = other DNA
cgaggcttagacatttgtc

SEQ ID NO: 37014 - DNA, 19 bp, synthetic construct
  source 1..19: mol_type = other DNA
acgaggcttagacatttgt

SEQ ID NO: 37015 - DNA, 19 bp, synthetic construct
  source 1..19: mol_type = other DNA
cacgaggcttagacatttg

SEQ ID NO: 37016 - DNA, 19 bp, synthetic construct
  source 1..19: mol_type = other DNA
ccacgaggcttagacattt

SEQ ID NO: 37017 - DNA, 19 bp, synthetic construct
  source 1..19: mol_type = other DNA
accacgaggcttagacatt

SEQ ID NO: 37018 - DNA, 19 bp, synthetic construct
  source 1..19: mol_type = other DNA
aaccacgaggcttagacat

SEQ ID NO: 37019 - DNA, 19 bp, synthetic construct
  source 1..19: mol_type = other DNA
taaccacgaggcttagaca

SEQ ID NO: 37020 - DNA, 19 bp, synthetic construct
  source 1..19: mol_type = other DNA
ctaaccacgaggcttagac

SEQ ID NO: 37021 - DNA, 19 bp, synthetic construct
  source 1..19: mol_type = other DNA
actaaccacgaggcttaga

SEQ ID NO: 37022 - DNA, 19 bp, synthetic construct
  source 1..19: mol_type = other DNA
cactaaccacgaggcttag

SEQ ID NO: 37023 - DNA, 19 bp, synthetic construct
  source 1..19: mol_type = other DNA
ccactaaccacgaggctta

SEQ ID NO: 37024 - DNA, 19 bp, synthetic construct
  source 1..19: mol_type = other DNA
cccactaaccacgaggctt

SEQ ID NO: 37025 - DNA, 19 bp, synthetic construct
  source 1..19: mol_type = other DNA
ccccactaaccacgaggct

SEQ ID NO: 37026 - DNA, 19 bp, synthetic construct
  source 1..19: mol_type = other DNA
tccccactaaccacgaggc

SEQ ID NO: 37027 - DNA, 19 bp, synthetic construct
  source 1..19: mol_type = other DNA
gtccccactaaccacgagg

SEQ ID NO: 37028 - DNA, 19 bp, synthetic construct
  source 1..19: mol_type = other DNA
tgtccccactaaccacgag

SEQ ID NO: 37029 - DNA, 19 bp, synthetic construct
  source 1..19: mol_type = other DNA
atgtccccactaaccacga

SEQ ID NO: 37030 - DNA, 19 bp, synthetic construct
  source 1..19: mol_type = other DNA
aatgtccccactaaccacg

SEQ ID NO: 37031 - DNA, 19 bp, synthetic construct
  source 1..19: mol_type = other DNA
caatgtccccactaaccac

SEQ ID NO: 37032 - DNA, 19 bp, synthetic construct
  source 1..19: mol_type = other DNA
gcaatgtccccactaacca

SEQ ID NO: 37033 - DNA, 19 bp, synthetic construct
  source 1..19: mol_type = other DNA
agcaatgtccccactaacc

SEQ ID NO: 37034 - DNA, 19 bp, synthetic construct
  source 1..19: mol_type = other DNA
cagcaatgtccccactaac

SEQ ID NO: 37035 - DNA, 19 bp, synthetic construct
  source 1..19: mol_type = other DNA
ccagcaatgtccccactaa

SEQ ID NO: 37036 - DNA, 19 bp, synthetic construct
  source 1..19: mol_type = other DNA
accagcaatgtccccacta

SEQ ID NO: 37037 - DNA, 19 bp, synthetic construct
  source 1..19: mol_type = other DNA
caccagcaatgtccccact

SEQ ID NO: 37038 - DNA, 19 bp, synthetic construct
  source 1..19: mol_type = other DNA
actccaccagcaatgtccc

SEQ ID NO: 37039 - DNA, 19 bp, synthetic construct
  source 1..19: mol_type = other DNA
gactccaccagcaatgtcc

SEQ ID NO: 37040 - DNA, 19 bp, synthetic construct
  source 1..19: mol_type = other DNA
agactccaccagcaatgtc

SEQ ID NO: 37041 - DNA, 19 bp, synthetic construct
  source 1..19: mol_type = other DNA
cagactccaccagcaatgt

SEQ ID NO: 37042 - DNA, 19 bp, synthetic construct
  source 1..19: mol_type = other DNA
tcagactccaccagcaatg

SEQ ID NO: 37043 - DNA, 19 bp, synthetic construct
  source 1..19: mol_type = other DNA
ttcagactccaccagcaat

SEQ ID NO: 37044 - DNA, 19 bp, synthetic construct
  source 1..19: mol_type = other DNA
tttcagactccaccagcaa

SEQ ID NO: 37045 - DNA, 19 bp, synthetic construct
  source 1..19: mol_type = other DNA
atttcagactccaccagca

SEQ ID NO: 37046 - DNA, 19 bp, synthetic construct
  source 1..19: mol_type = other DNA
aatttcagactccaccagc

SEQ ID NO: 37047 - DNA, 19 bp, synthetic construct
  source 1..19: mol_type = other DNA
caatttcagactccaccag

SEQ ID NO: 37048 - DNA, 19 bp, synthetic construct
  source 1..19: mol_type = other DNA
acaatttcagactccacca

SEQ ID NO: 37049 - DNA, 19 bp, synthetic construct
  source 1..19: mol_type = other DNA
gacaatttcagactccacc

SEQ ID NO: 37050 - DNA, 19 bp, synthetic construct
  source 1..19: mol_type = other DNA
tgacaatttcagactccac

SEQ ID NO: 37051 - DNA, 19 bp, synthetic construct
  source 1..19: mol_type = other DNA
atgacaatttcagactcca

SEQ ID NO: 37052 - DNA, 19 bp, synthetic construct
  source 1..19: mol_type = other DNA
catgacaatttcagactcc

SEQ ID NO: 37053 - DNA, 19 bp, synthetic construct
  source 1..19: mol_type = other DNA
gcatgacaatttcagactc

SEQ ID NO: 37054 - DNA, 19 bp, synthetic construct
  source 1..19: mol_type = other DNA
tgcatgacaatttcagact

SEQ ID NO: 37055 - DNA, 19 bp, synthetic construct
  source 1..19: mol_type = other DNA
ctgcatgacaatttcagac

SEQ ID NO: 37056 - DNA, 19 bp, synthetic construct
  source 1..19: mol_type = other DNA
actgcatgacaatttcaga

SEQ ID NO: 37057 - DNA, 19 bp, synthetic construct
  source 1..19: mol_type = other DNA
cactgcatgacaatttcag

SEQ ID NO: 37058 - DNA, 19 bp, synthetic construct
  source 1..19: mol_type = other DNA
tcactgcatgacaatttca

SEQ ID NO: 37059 - DNA, 19 bp, synthetic construct
  source 1..19: mol_type = other DNA
gtcactgcatgacaatttc

SEQ ID NO: 37060 - DNA, 19 bp, synthetic construct
  source 1..19: mol_type = other DNA
agtcactgcatgacaattt

SEQ ID NO: 37061 - DNA, 19 bp, synthetic construct
  source 1..19: mol_type = other DNA
gagtcactgcatgacaatt

SEQ ID NO: 37062 - DNA, 19 bp, synthetic construct
  source 1..19: mol_type = other DNA
tgagtcactgcatgacaat

SEQ ID NO: 37063 - DNA, 19 bp, synthetic construct
  source 1..19: mol_type = other DNA
gtgagtcactgcatgacaa

SEQ ID NO: 37064 - DNA, 19 bp, synthetic construct
  source 1..19: mol_type = other DNA
agtgagtcactgcatgaca

SEQ ID NO: 37065 - DNA, 19 bp, synthetic construct
  source 1..19: mol_type = other DNA
gagtgagtcactgcatgac

SEQ ID NO: 37066 - DNA, 19 bp, synthetic construct
  source 1..19: mol_type = other DNA
tgagtgagtcactgcatga

SEQ ID NO: 37067 - DNA, 19 bp, synthetic construct
  source 1..19: mol_type = other DNA
ttgagtgagtcactgcatg

SEQ ID NO: 37068 - DNA, 19 bp, synthetic construct
  source 1..19: mol_type = other DNA
cttgagtgagtcactgcat

SEQ ID NO: 37069 - DNA, 19 bp, synthetic construct
  source 1..19: mol_type = other DNA
gcttgagtgagtcactgca

SEQ ID NO: 37070 - DNA, 19 bp, synthetic construct
  source 1..19: mol_type = other DNA
agcttgagtgagtcactgc

SEQ ID NO: 37071 - DNA, 19 bp, synthetic construct
  source 1..19: mol_type = other DNA
aagcttgagtgagtcactg

SEQ ID NO: 37072 - DNA, 19 bp, synthetic construct
  source 1..19: mol_type = other DNA
taagcttgagtgagtcact

SEQ ID NO: 37073 - DNA, 19 bp, synthetic construct
  source 1..19: mol_type = other DNA
ctaagcttgagtgagtcac

SEQ ID NO: 37074 - DNA, 19 bp, synthetic construct
  source 1..19: mol_type = other DNA
cctaagcttgagtgagtca

SEQ ID NO: 37075 - DNA, 19 bp, synthetic construct
  source 1..19: mol_type = other DNA
gcctaagcttgagtgagtc

SEQ ID NO: 37076 - DNA, 19 bp, synthetic construct
  source 1..19: mol_type = other DNA
tgcctaagcttgagtgagt

SEQ ID NO: 37077 - DNA, 19 bp, synthetic construct
  source 1..19: mol_type = other DNA
ctgcctaagcttgagtgag

SEQ ID NO: 37078 - DNA, 19 bp, synthetic construct
  source 1..19: mol_type = other DNA
tctgcctaagcttgagtga

SEQ ID NO: 37079 - DNA, 19 bp, synthetic construct
  source 1..19: mol_type = other DNA
atctgcctaagcttgagtg

SEQ ID NO: 37080 - DNA, 19 bp, synthetic construct
  source 1..19: mol_type = other DNA
aatctgcctaagcttgagt

SEQ ID NO: 37081 - DNA, 19 bp, synthetic construct
  source 1..19: mol_type = other DNA
aaatctgcctaagcttgag

SEQ ID NO: 37082 - DNA, 19 bp, synthetic construct
  source 1..19: mol_type = other DNA
caaatctgcctaagcttga

SEQ ID NO: 37083 - DNA, 19 bp, synthetic construct
  source 1..19: mol_type = other DNA
ccaaatctgcctaagcttg

SEQ ID NO: 37084 - DNA, 19 bp, synthetic construct
  source 1..19: mol_type = other DNA
accaaatctgcctaagctt

SEQ ID NO: 37085 - DNA, 19 bp, synthetic construct
  source 1..19: mol_type = other DNA
caccaaatctgcctaagct

SEQ ID NO: 37086 - DNA, 19 bp, synthetic construct
  source 1..19: mol_type = other DNA
tcaccaaatctgcctaagc

SEQ ID NO: 37087 - DNA, 19 bp, synthetic construct
  source 1..19: mol_type = other DNA
atcaccaaatctgcctaag

SEQ ID NO: 37088 - DNA, 19 bp, synthetic construct
  source 1..19: mol_type = other DNA
tatcaccaaatctgcctaa

SEQ ID NO: 37089 - DNA, 19 bp, synthetic construct
  source 1..19: mol_type = other DNA
atatcaccaaatctgccta

SEQ ID NO: 37090 - DNA, 19 bp, synthetic construct
  source 1..19: mol_type = other DNA
tatatcaccaaatctgcct

SEQ ID NO: 37091 - DNA, 19 bp, synthetic construct
  source 1..19: mol_type = other DNA
atatatcaccaaatctgcc

SEQ ID NO: 37092 - DNA, 19 bp, synthetic construct
  source 1..19: mol_type = other DNA
catatatcaccaaatctgc

SEQ ID NO: 37093 - DNA, 19 bp, synthetic construct
  source 1..19: mol_type = other DNA
gtcatatatcaccaaatct

SEQ ID NO: 37094 - DNA, 19 bp, synthetic construct
  source 1..19: mol_type = other DNA
ctgtgtcatatatcaccaa

SEQ ID NO: 37095 - DNA, 19 bp, synthetic construct
  source 1..19: mol_type = other DNA
tctgtgtcatatatcacca

SEQ ID NO: 37096 - DNA, 19 bp, synthetic construct
  source 1..19: mol_type = other DNA
ctctgtgtcatatatcacc

SEQ ID NO: 37097 - DNA, 19 bp, synthetic construct
  source 1..19: mol_type = other DNA
tctctgtgtcatatatcac

SEQ ID NO: 37098 - DNA, 19 bp, synthetic construct
  source 1..19: mol_type = other DNA
atctctgtgtcatatatca

SEQ ID NO: 37099 - DNA, 19 bp, synthetic construct
  source 1..19: mol_type = other DNA
catctctgtgtcatatatc

SEQ ID NO: 37100 - DNA, 19 bp, synthetic construct
  source 1..19: mol_type = other DNA
gcatctctgtgtcatatat

SEQ ID NO: 37101 - DNA, 19 bp, synthetic construct
  source 1..19: mol_type = other DNA
tgcatctctgtgtcatata

SEQ ID NO: 37102 - DNA, 19 bp, synthetic construct
  source 1..19: mol_type = other DNA
ttgcatctctgtgtcatat

SEQ ID NO: 37103 - DNA, 19 bp, synthetic construct
  source 1..19: mol_type = other DNA
tttgcatctctgtgtcata

SEQ ID NO: 37104 - DNA, 19 bp, synthetic construct
  source 1..19: mol_type = other DNA
ctttgcatctctgtgtcat

SEQ ID NO: 37105 - DNA, 19 bp, synthetic construct
  source 1..19: mol_type = other DNA
tctttgcatctctgtgtca

SEQ ID NO: 37106 - DNA, 19 bp, synthetic construct
  source 1..19: mol_type = other DNA
ttctttgcatctctgtgtc

SEQ ID NO: 37107 - DNA, 19 bp, synthetic construct
  source 1..19: mol_type = other DNA
tttctttgcatctctgtgt

SEQ ID NO: 37108 - DNA, 19 bp, synthetic construct
  source 1..19: mol_type = other DNA
atttctttgcatctctgtg

SEQ ID NO: 37109 - DNA, 19 bp, synthetic construct
  source 1..19: mol_type = other DNA
catttctttgcatctctgt

SEQ ID NO: 37110 - DNA, 19 bp, synthetic construct
  source 1..19: mol_type = other DNA
acatttctttgcatctctg

SEQ ID NO: 37111 - DNA, 19 bp, synthetic construct
  source 1..19: mol_type = other DNA
aacatttctttgcatctct

SEQ ID NO: 37112 - DNA, 19 bp, synthetic construct
  source 1..19: mol_type = other DNA
caacatttctttgcatctc

SEQ ID NO: 37113 - DNA, 19 bp, synthetic construct
  source 1..19: mol_type = other DNA
acaacatttctttgcatct

SEQ ID NO: 37114 - DNA, 19 bp, synthetic construct
  source 1..19: mol_type = other DNA
tacaacatttctttgcatc

SEQ ID NO: 37115 - DNA, 19 bp, synthetic construct
  source 1..19: mol_type = other DNA
ctacaacatttctttgcat

SEQ ID NO: 37116 - DNA, 19 bp, synthetic construct
  source 1..19: mol_type = other DNA
gctacaacatttctttgca

SEQ ID NO: 37117 - DNA, 19 bp, synthetic construct
  source 1..19: mol_type = other DNA
agctacaacatttctttgc

SEQ ID NO: 37118 - DNA, 19 bp, synthetic construct
  source 1..19: mol_type = other DNA
cagctacaacatttctttg

SEQ ID NO: 37119 - DNA, 19 bp, synthetic construct
  source 1..19: mol_type = other DNA
tcagctacaacatttcttt

SEQ ID NO: 37120 - DNA, 19 bp, synthetic construct
  source 1..19: mol_type = other DNA
gtcagctacaacatttctt

SEQ ID NO: 37121 - DNA, 19 bp, synthetic construct
  source 1..19: mol_type = other DNA
tgtcagctacaacatttct

SEQ ID NO: 37122 - DNA, 19 bp, synthetic construct
  source 1..19: mol_type = other DNA
gtgtcagctacaacatttc

SEQ ID NO: 37123 - DNA, 19 bp, synthetic construct
  source 1..19: mol_type = other DNA
tgtgtcagctacaacattt

SEQ ID NO: 37124 - DNA, 19 bp, synthetic construct
  source 1..19: mol_type = other DNA
gtgtgtcagctacaacatt

SEQ ID NO: 37125 - DNA, 19 bp, synthetic construct
  source 1..19: mol_type = other DNA
tgtgtgtcagctacaacat

SEQ ID NO: 37126 - DNA, 19 bp, synthetic construct
  source 1..19: mol_type = other DNA
gtgtgtgtcagctacaaca

SEQ ID NO: 37127 - DNA, 19 bp, synthetic construct
  source 1..19: mol_type = other DNA
tgtgtgtgtcagctacaac

SEQ ID NO: 37128 - DNA, 19 bp, synthetic construct
  source 1..19: mol_type = other DNA
ctgtgtgtgtcagctacaa

SEQ ID NO: 37129 - DNA, 19 bp, synthetic construct
  source 1..19: mol_type = other DNA
cctgtgtgtgtcagctaca

SEQ ID NO: 37130 - DNA, 19 bp, synthetic construct
  source 1..19: mol_type = other DNA
cttctgcatctcccagagc

SEQ ID NO: 37131 - DNA, 19 bp, synthetic construct
  source 1..19: mol_type = other DNA
ccttctgcatctcccagag

SEQ ID NO: 37132 - DNA, 19 bp, synthetic construct
  source 1..19: mol_type = other DNA
acgtgctccttctgcatct

SEQ ID NO: 37133 - DNA, 19 bp, synthetic construct
  source 1..19: mol_type = other DNA
gacgtgctccttctgcatc

SEQ ID NO: 37134 - DNA, 19 bp, synthetic construct
  source 1..19: mol_type = other DNA
ggacgtgctccttctgcat

SEQ ID NO: 37135 - DNA, 19 bp, synthetic construct
  source 1..19: mol_type = other DNA
tttgggggacgtgctcctt

SEQ ID NO: 37136 - DNA, 19 bp, synthetic construct
  source 1..19: mol_type = other DNA
ttttgggggacgtgctcct

SEQ ID NO: 37137 - DNA, 19 bp, synthetic construct
  source 1..19: mol_type = other DNA
attttgggggacgtgctcc

SEQ ID NO: 37138 - DNA, 19 bp, synthetic construct
  source 1..19: mol_type = other DNA
cattttgggggacgtgctc

SEQ ID NO: 37139 - DNA, 19 bp, synthetic construct
  source 1..19: mol_type = other DNA
tcattttgggggacgtgct

SEQ ID NO: 37140 - DNA, 19 bp, synthetic construct
  source 1..19: mol_type = other DNA
ttcattttgggggacgtgc

SEQ ID NO: 37141 - DNA, 19 bp, synthetic construct
  source 1..19: mol_type = other DNA
cttcattttgggggacgtg

SEQ ID NO: 37142 - DNA, 19 bp, synthetic construct
  source 1..19: mol_type = other DNA
gcttcattttgggggacgt

SEQ ID NO: 37143 - DNA, 19 bp, synthetic construct
  source 1..19: mol_type = other DNA
ggcttcattttgggggacg

SEQ ID NO: 37144 - DNA, 19 bp, synthetic construct
  source 1..19: mol_type = other DNA
tggcttcattttgggggac

SEQ ID NO: 37145 - DNA, 19 bp, synthetic construct
  source 1..19: mol_type = other DNA
ctggcttcattttggggga

SEQ ID NO: 37146 - DNA, 19 bp, synthetic construct
  source 1..19: mol_type = other DNA
tctggcttcattttggggg

SEQ ID NO: 37147 - DNA, 19 bp, synthetic construct
  source 1..19: mol_type = other DNA
gtctggcttcattttgggg

SEQ ID NO: 37148 - DNA, 19 bp, synthetic construct
  source 1..19: mol_type = other DNA
tgtctggcttcattttggg

SEQ ID NO: 37149 - DNA, 19 bp, synthetic construct
  source 1..19: mol_type = other DNA
ctgtctggcttcattttgg

SEQ ID NO: 37150 - DNA, 19 bp, synthetic construct
  source 1..19: mol_type = other DNA
tctgtctggcttcattttg

SEQ ID NO: 37151 - DNA, 19 bp, synthetic construct
  source 1..19: mol_type = other DNA
gtctgtctggcttcatttt

SEQ ID NO: 37152 - DNA, 19 bp, synthetic construct
  source 1..19: mol_type = other DNA
tgtctgtctggcttcattt

SEQ ID NO: 37153 - DNA, 19 bp, synthetic construct
  source 1..19: mol_type = other DNA
atgtctgtctggcttcatt

SEQ ID NO: 37154 - DNA, 19 bp, synthetic construct
  source 1..19: mol_type = other DNA
gatgtctgtctggcttcat

SEQ ID NO: 37155 - DNA, 19 bp, synthetic construct
  source 1..19: mol_type = other DNA
ggatgtctgtctggcttca

SEQ ID NO: 37156 - DNA, 19 bp, synthetic construct
  source 1..19: mol_type = other DNA
aggatgtctgtctggcttc

SEQ ID NO: 37157 - DNA, 19 bp, synthetic construct
  source 1..19: mol_type = other DNA
aaggatgtctgtctggctt

SEQ ID NO: 37158 - DNA, 19 bp, synthetic construct
  source 1..19: mol_type = other DNA
taaggatgtctgtctggct

SEQ ID NO: 37159 - DNA, 19 bp, synthetic construct
  source 1..19: mol_type = other DNA
ttaaggatgtctgtctggc

SEQ ID NO: 37160 - DNA, 19 bp, synthetic construct
  source 1..19: mol_type = other DNA
cttaaggatgtctgtctgg

SEQ ID NO: 37161 - DNA, 19 bp, synthetic construct
  source 1..19: mol_type = other DNA
ccttaaggatgtctgtctg

SEQ ID NO: 37162 - DNA, 19 bp, synthetic construct
  source 1..19: mol_type = other DNA
tccttaaggatgtctgtct

SEQ ID NO: 37163 - DNA, 19 bp, synthetic construct
  source 1..19: mol_type = other DNA
ttccttaaggatgtctgtc

SEQ ID NO: 37164 - DNA, 19 bp, synthetic construct
  source 1..19: mol_type = other DNA
cttccttaaggatgtctgt

SEQ ID NO: 37165 - DNA, 19 bp, synthetic construct
  source 1..19: mol_type = other DNA
ccttccttaaggatgtctg

SEQ ID NO: 37166 - DNA, 19 bp, synthetic construct
  source 1..19: mol_type = other DNA
tccttccttaaggatgtct

SEQ ID NO: 37167 - DNA, 19 bp, synthetic construct
  source 1..19: mol_type = other DNA
ctccttccttaaggatgtc

SEQ ID NO: 37168 - DNA, 19 bp, synthetic construct
  source 1..19: mol_type = other DNA
gctccttccttaaggatgt

SEQ ID NO: 37169 - DNA, 19 bp, synthetic construct
  source 1..19: mol_type = other DNA
tgctccttccttaaggatg

SEQ ID NO: 37170 - DNA, 19 bp, synthetic construct
  source 1..19: mol_type = other DNA
ttgctccttccttaaggat

SEQ ID NO: 37171 - DNA, 19 bp, synthetic construct
  source 1..19: mol_type = other DNA
tttgctccttccttaagga

SEQ ID NO: 37172 - DNA, 19 bp, synthetic construct
  source 1..19: mol_type = other DNA
ctttgctccttccttaagg

SEQ ID NO: 37173 - DNA, 19 bp, synthetic construct
  source 1..19: mol_type = other DNA
cctttgctccttccttaag

SEQ ID NO: 37174 - DNA, 19 bp, synthetic construct
  source 1..19: mol_type = other DNA
ccctttgctccttccttaa

SEQ ID NO: 37175 - DNA, 19 bp, synthetic construct
  source 1..19: mol_type = other DNA
tgaagcccctttgctcctt

SEQ ID NO: 37176 - DNA, 19 bp, synthetic construct
  source 1..19: mol_type = other DNA
atgaagcccctttgctcct

SEQ ID NO: 37177 - DNA, 19 bp, synthetic construct
  source 1..19: mol_type = other DNA
gatgaagcccctttgctcc

SEQ ID NO: 37178 - DNA, 19 bp, synthetic construct
  source 1..19: mol_type = other DNA
agatgaagcccctttgctc

SEQ ID NO: 37179 - DNA, 19 bp, synthetic construct
  source 1..19: mol_type = other DNA
aagatgaagcccctttgct

SEQ ID NO: 37180 - DNA, 19 bp, synthetic construct
  source 1..19: mol_type = other DNA
taagatgaagcccctttgc

SEQ ID NO: 37181 - DNA, 19 bp, synthetic construct
  source 1..19: mol_type = other DNA
ttaagatgaagcccctttg

SEQ ID NO: 37182 - DNA, 19 bp, synthetic construct
  source 1..19: mol_type = other DNA
tttaagatgaagccccttt

SEQ ID NO: 37183 - DNA, 19 bp, synthetic construct
  source 1..19: mol_type = other DNA
ctttaagatgaagcccctt

SEQ ID NO: 37184 - DNA, 19 bp, synthetic construct
  source 1..19: mol_type = other DNA
tctttaagatgaagcccct

SEQ ID NO: 37185 - DNA, 19 bp, synthetic construct
  source 1..19: mol_type = other DNA
ttctttaagatgaagcccc

SEQ ID NO: 37186 - DNA, 19 bp, synthetic construct
  source 1..19: mol_type = other DNA
attctttaagatgaagccc

SEQ ID NO: 37187 - DNA, 19 bp, synthetic construct
  source 1..19: mol_type = other DNA
cattctttaagatgaagcc

SEQ ID NO: 37188 - DNA, 19 bp, synthetic construct
  source 1..19: mol_type = other DNA
ccttcttcattctttaaga

SEQ ID NO: 37189 - DNA, 19 bp, synthetic construct
  source 1..19: mol_type = other DNA
cccttcttcattctttaag

SEQ ID NO: 37190 - DNA, 19 bp, synthetic construct
  source 1..19: mol_type = other DNA
tcccttcttcattctttaa

SEQ ID NO: 37191 - DNA, 19 bp, synthetic construct
  source 1..19: mol_type = other DNA
atcccttcttcattcttta

SEQ ID NO: 37192 - DNA, 19 bp, synthetic construct
  source 1..19: mol_type = other DNA
aatcccttcttcattcttt

SEQ ID NO: 37193 - DNA, 19 bp, synthetic construct
  source 1..19: mol_type = other DNA
aaatcccttcttcattctt

SEQ ID NO: 37194 - DNA, 19 bp, synthetic construct
  source 1..19: mol_type = other DNA
caaatcccttcttcattct

SEQ ID NO: 37195 - DNA, 19 bp, synthetic construct
  source 1..19: mol_type = other DNA
acaaatcccttcttcattc

SEQ ID NO: 37196 - DNA, 19 bp, synthetic construct
  source 1..19: mol_type = other DNA
gacaaatcccttcttcatt

SEQ ID NO: 37197 - DNA, 19 bp, synthetic construct
  source 1..19: mol_type = other DNA
tgacaaatcccttcttcat

SEQ ID NO: 37198 - DNA, 19 bp, synthetic construct
  source 1..19: mol_type = other DNA
atgacaaatcccttcttca

SEQ ID NO: 37199 - DNA, 19 bp, synthetic construct
  source 1..19: mol_type = other DNA
catgacaaatcccttcttc

SEQ ID NO: 37200 - DNA, 19 bp, synthetic construct
  source 1..19: mol_type = other DNA
tcatgacaaatcccttctt

SEQ ID NO: 37201 - DNA, 19 bp, synthetic construct
  source 1..19: mol_type = other DNA
ctcatgacaaatcccttct

SEQ ID NO: 37202 - DNA, 19 bp, synthetic construct
  source 1..19: mol_type = other DNA
tctcatgacaaatcccttc

SEQ ID NO: 37203 - DNA, 19 bp, synthetic construct
  source 1..19: mol_type = other DNA
ctctcatgacaaatccctt

SEQ ID NO: 37204 - DNA, 19 bp, synthetic construct
  source 1..19: mol_type = other DNA
tctctcatgacaaatccct

SEQ ID NO: 37205 - DNA, 19 bp, synthetic construct
  source 1..19: mol_type = other DNA
atctctcatgacaaatccc

SEQ ID NO: 37206 - DNA, 19 bp, synthetic construct
  source 1..19: mol_type = other DNA
catctctcatgacaaatcc

SEQ ID NO: 37207 - DNA, 19 bp, synthetic construct
  source 1..19: mol_type = other DNA
ccacatctctcatgacaaa

SEQ ID NO: 37208 - DNA, 19 bp, synthetic construct
  source 1..19: mol_type = other DNA
gccacatctctcatgacaa

SEQ ID NO: 37209 - DNA, 19 bp, synthetic construct
  source 1..19: mol_type = other DNA
tgccacatctctcatgaca

SEQ ID NO: 37210 - DNA, 19 bp, synthetic construct
  source 1..19: mol_type = other DNA
ctgccacatctctcatgac

SEQ ID NO: 37211 - DNA, 19 bp, synthetic construct
  source 1..19: mol_type = other DNA
cctgccacatctctcatga

SEQ ID NO: 37212 - DNA, 19 bp, synthetic construct
  source 1..19: mol_type = other DNA
tcctgccacatctctcatg

SEQ ID NO: 37213 - DNA, 19 bp, synthetic construct
  source 1..19: mol_type = other DNA
ttcctgccacatctctcat

SEQ ID NO: 37214 - DNA, 19 bp, synthetic construct
  source 1..19: mol_type = other DNA
attcctgccacatctctca

SEQ ID NO: 37215 - DNA, 19 bp, synthetic construct
  source 1..19: mol_type = other DNA
aattcctgccacatctctc

SEQ ID NO: 37216 - DNA, 19 bp, synthetic construct
  source 1..19: mol_type = other DNA
aaattcctgccacatctct

SEQ ID NO: 37217 - DNA, 19 bp, synthetic construct
  source 1..19: mol_type = other DNA
gaaattcctgccacatctc

SEQ ID NO: 37218 - DNA, 19 bp, synthetic construct
  source 1..19: mol_type = other DNA
agaaattcctgccacatct

SEQ ID NO: 37219 - DNA, 19 bp, synthetic construct
  source 1..19: mol_type = other DNA
aagaaattcctgccacatc

SEQ ID NO: 37220 - DNA, 19 bp, synthetic construct
  source 1..19: mol_type = other DNA
caagaaattcctgccacat

SEQ ID NO: 37221 - DNA, 19 bp, synthetic construct
  source 1..19: mol_type = other DNA
tcaagaaattcctgccaca

SEQ ID NO: 37222 - DNA, 19 bp, synthetic construct
  source 1..19: mol_type = other DNA
ctcaagaaattcctgccac

SEQ ID NO: 37223 - DNA, 19 bp, synthetic construct
  source 1..19: mol_type = other DNA
tctcaagaaattcctgcca

SEQ ID NO: 37224 - DNA, 19 bp, synthetic construct
  source 1..19: mol_type = other DNA
ctctcaagaaattcctgcc

SEQ ID NO: 37225 - DNA, 19 bp, synthetic construct
  source 1..19: mol_type = other DNA
cctctcaagaaattcctgc

SEQ ID NO: 37226 - DNA, 19 bp, synthetic construct
  source 1..19: mol_type = other DNA
gcctctcaagaaattcctg

SEQ ID NO: 37227 - DNA, 19 bp, synthetic construct
  source 1..19: mol_type = other DNA
tgcctctcaagaaattcct

SEQ ID NO: 37228 - DNA, 19 bp, synthetic construct
  source 1..19: mol_type = other DNA
ctgcctctcaagaaattcc

SEQ ID NO: 37229 - DNA, 19 bp, synthetic construct
  source 1..19: mol_type = other DNA
tctgcctctcaagaaattc

SEQ ID NO: 37230 - DNA, 19 bp, synthetic construct
  source 1..19: mol_type = other DNA
ctctgcctctcaagaaatt

SEQ ID NO: 37231 - DNA, 19 bp, synthetic construct
  source 1..19: mol_type = other DNA
cctctgcctctcaagaaat

SEQ ID NO: 37232 - DNA, 19 bp, synthetic construct
  source 1..19: mol_type = other DNA
ccctctgcctctcaagaaa

SEQ ID NO: 37233 - DNA, 19 bp, synthetic construct
  source 1..19: mol_type = other DNA
tccctctgcctctcaagaa

SEQ ID NO: 37234 - DNA, 19 bp, synthetic construct
  source 1..19: mol_type = other DNA
ttctcatgctctccctctg

SEQ ID NO: 37235 - DNA, 19 bp, synthetic construct
  source 1..19: mol_type = other DNA
attctcatgctctccctct

SEQ ID NO: 37236 - DNA, 19 bp, synthetic construct
  source 1..19: mol_type = other DNA
cattctcatgctctccctc

SEQ ID NO: 37237 - DNA, 19 bp, synthetic construct
  source 1..19: mol_type = other DNA
acattctcatgctctccct

SEQ ID NO: 37238 - DNA, 19 bp, synthetic construct
  source 1..19: mol_type = other DNA
aacattctcatgctctccc

SEQ ID NO: 37239 - DNA, 19 bp, synthetic construct
  source 1..19: mol_type = other DNA
taacattctcatgctctcc

SEQ ID NO: 37240 - DNA, 19 bp, synthetic construct
  source 1..19: mol_type = other DNA
ctaacattctcatgctctc

SEQ ID NO: 37241 - DNA, 19 bp, synthetic construct
  source 1..19: mol_type = other DNA
cctaacattctcatgctct

SEQ ID NO: 37242 - DNA, 19 bp, synthetic construct
  source 1..19: mol_type = other DNA
tcctaacattctcatgctc

SEQ ID NO: 37243 - DNA, 19 bp, synthetic construct
  source 1..19: mol_type = other DNA
ttcctaacattctcatgct

SEQ ID NO: 37244 - DNA, 19 bp, synthetic construct
  source 1..19: mol_type = other DNA
cttcctaacattctcatgc

SEQ ID NO: 37245 - DNA, 19 bp, synthetic construct
  source 1..19: mol_type = other DNA
ccttcctaacattctcatg

SEQ ID NO: 37246 - DNA, 19 bp, synthetic construct
  source 1..19: mol_type = other DNA
gccttcctaacattctcat

SEQ ID NO: 37247 - DNA, 19 bp, synthetic construct
  source 1..19: mol_type = other DNA
tgccttcctaacattctca

SEQ ID NO: 37248 - DNA, 19 bp, synthetic construct
  source 1..19: mol_type = other DNA
ctgccttcctaacattctc

SEQ ID NO: 37249 - DNA, 19 bp, synthetic construct
  source 1..19: mol_type = other DNA
cctgccttcctaacattct

SEQ ID NO: 37250 - DNA, 19 bp, synthetic construct
  source 1..19: mol_type = other DNA
tcctgccttcctaacattc

SEQ ID NO: 37251 - DNA, 19 bp, synthetic construct
  source 1..19: mol_type = other DNA
ctcctgccttcctaacatt

SEQ ID NO: 37252 - DNA, 19 bp, synthetic construct
  source 1..19: mol_type = other DNA
tctcctgccttcctaacat

SEQ ID NO: 37253 - DNA, 19 bp, synthetic construct
  source 1..19: mol_type = other DNA
ctctcctgccttcctaaca

SEQ ID NO: 37254 - DNA, 19 bp, synthetic construct
  source 1..19: mol_type = other DNA
tctctcctgccttcctaac

SEQ ID NO: 37255 - DNA, 19 bp, synthetic construct
  source 1..19: mol_type = other DNA
tgagagtctctcctgcctt

SEQ ID NO: 37256 - DNA, 19 bp, synthetic construct
  source 1..19: mol_type = other DNA
tgtgtgagagtctctcctg

SEQ ID NO: 37257 - DNA, 19 bp, synthetic construct
  source 1..19: mol_type = other DNA
atgtgtgagagtctctcct

SEQ ID NO: 37258 - DNA, 19 bp, synthetic construct
  source 1..19: mol_type = other DNA
gatgtgtgagagtctctcc

SEQ ID NO: 37259 - DNA, 19 bp, synthetic construct
  source 1..19: mol_type = other DNA
agatgtgtgagagtctctc

SEQ ID NO: 37260 - DNA, 19 bp, synthetic construct
  source 1..19: mol_type = other DNA
cagatgtgtgagagtctct

SEQ ID NO: 37261 - DNA, 19 bp, synthetic construct
  source 1..19: mol_type = other DNA
ccagatgtgtgagagtctc

SEQ ID NO: 37262 - DNA, 19 bp, synthetic construct
  source 1..19: mol_type = other DNA
cccagatgtgtgagagtct

SEQ ID NO: 37263 - DNA, 19 bp, synthetic construct
  source 1..19: mol_type = other DNA
tcccagatgtgtgagagtc

SEQ ID NO: 37264 - DNA, 19 bp, synthetic construct
  source 1..19: mol_type = other DNA
ttcccagatgtgtgagagt

SEQ ID NO: 37265 - DNA, 19 bp, synthetic construct
  source 1..19: mol_type = other DNA
cttcccagatgtgtgagag

SEQ ID NO: 37266 - DNA, 19 bp, synthetic construct
  source 1..19: mol_type = other DNA
gcttcccagatgtgtgaga

SEQ ID NO: 37267 - DNA, 19 bp, synthetic construct
  source 1..19: mol_type = other DNA
agcttcccagatgtgtgag

SEQ ID NO: 37268 - DNA, 19 bp, synthetic construct
  source 1..19: mol_type = other DNA
cagcttcccagatgtgtga

SEQ ID NO: 37269 - DNA, 19 bp, synthetic construct
  source 1..19: mol_type = other DNA
tcagcttcccagatgtgtg

SEQ ID NO: 37270 - DNA, 19 bp, synthetic construct
  source 1..19: mol_type = other DNA
gtcagcttcccagatgtgt

SEQ ID NO: 37271 - DNA, 19 bp, synthetic construct
  source 1..19: mol_type = other DNA
tgtcagcttcccagatgtg

SEQ ID NO: 37272 - DNA, 19 bp, synthetic construct
  source 1..19: mol_type = other DNA
ttgtcagcttcccagatgt

SEQ ID NO: 37273 - DNA, 19 bp, synthetic construct
  source 1..19: mol_type = other DNA
attgtcagcttcccagatg

SEQ ID NO: 37274 - DNA, 19 bp, synthetic construct
  source 1..19: mol_type = other DNA
gattgtcagcttcccagat

SEQ ID NO: 37275 - DNA, 19 bp, synthetic construct
  source 1..19: mol_type = other DNA
ggattgtcagcttcccaga

SEQ ID NO: 37276 - DNA, 19 bp, synthetic construct
  source 1..19: mol_type = other DNA
tggattgtcagcttcccag

SEQ ID NO: 37277 - DNA, 19 bp, synthetic construct
  source 1..19: mol_type = other DNA
atggattgtcagcttccca

SEQ ID NO: 37278 - DNA, 19 bp, synthetic construct
  source 1..19: mol_type = other DNA
gatggattgtcagcttccc

SEQ ID NO: 37279 - DNA, 19 bp, synthetic construct
  source 1..19: mol_type = other DNA
tgatggattgtcagcttcc

SEQ ID NO: 37280 - DNA, 19 bp, synthetic construct
  source 1..19: mol_type = other DNA
ctgatggattgtcagcttc

SEQ ID NO: 37281 - DNA, 19 bp, synthetic construct
  source 1..19: mol_type = other DNA
gctgatggattgtcagctt

SEQ ID NO: 37282 - DNA, 19 bp, synthetic construct
  source 1..19: mol_type = other DNA
tgctgatggattgtcagct

SEQ ID NO: 37283 - DNA, 19 bp, synthetic construct
  source 1..19: mol_type = other DNA
atgctgatggattgtcagc

SEQ ID NO: 37284 - DNA, 19 bp, synthetic construct
  source 1..19: mol_type = other DNA
catgctgatggattgtcag

SEQ ID NO: 37285 - DNA, 19 bp, synthetic construct
  source 1..19: mol_type = other DNA
acatgctgatggattgtca

SEQ ID NO: 37286 - DNA, 19 bp, synthetic construct
  source 1..19: mol_type = other DNA
gacatgctgatggattgtc

SEQ ID NO: 37287 - DNA, 19 bp, synthetic construct
  source 1..19: mol_type = other DNA
ggacatgctgatggattgt

SEQ ID NO: 37288 - DNA, 19 bp, synthetic construct
  source 1..19: mol_type = other DNA
tggacatgctgatggattg

SEQ ID NO: 37289 - DNA, 19 bp, synthetic construct
  source 1..19: mol_type = other DNA
ctggacatgctgatggatt

SEQ ID NO: 37290 - DNA, 19 bp, synthetic construct
  source 1..19: mol_type = other DNA
cctggacatgctgatggat

SEQ ID NO: 37291 - DNA, 19 bp, synthetic construct
  source 1..19: mol_type = other DNA
tcctggacatgctgatgga

SEQ ID NO: 37292 - DNA, 19 bp, synthetic construct
  source 1..19: mol_type = other DNA
ctcctggacatgctgatgg

SEQ ID NO: 37293 - DNA, 19 bp, synthetic construct
  source 1..19: mol_type = other DNA
cctcctggacatgctgatg

SEQ ID NO: 37294 - DNA, 19 bp, synthetic construct
  source 1..19: mol_type = other DNA
tcctcctggacatgctgat

SEQ ID NO: 37295 - DNA, 19 bp, synthetic construct
  source 1..19: mol_type = other DNA
ttcctcctggacatgctga

SEQ ID NO: 37296 - DNA, 19 bp, synthetic construct
  source 1..19: mol_type = other DNA
tttcctcctggacatgctg

SEQ ID NO: 37297 - DNA, 19 bp, synthetic construct
  source 1..19: mol_type = other DNA
ttttcctcctggacatgct

SEQ ID NO: 37298 - DNA, 19 bp, synthetic construct
  source 1..19: mol_type = other DNA
attttcctcctggacatgc

SEQ ID NO: 37299 - DNA, 19 bp, synthetic construct
  source 1..19: mol_type = other DNA
tattttcctcctggacatg

SEQ ID NO: 37300 - DNA, 19 bp, synthetic construct
  source 1..19: mol_type = other DNA
ttattttcctcctggacat

SEQ ID NO: 37301 - DNA, 19 bp, synthetic construct
  source 1..19: mol_type = other DNA
cttattttcctcctggaca

SEQ ID NO: 37302 - DNA, 19 bp, synthetic construct
  source 1..19: mol_type = other DNA
ccttattttcctcctggac

SEQ ID NO: 37303 - DNA, 19 bp, synthetic construct
  source 1..19: mol_type = other DNA
tccttattttcctcctgga

SEQ ID NO: 37304 - DNA, 19 bp, synthetic construct
  source 1..19: mol_type = other DNA
ctccttattttcctcctgg

SEQ ID NO: 37305 - DNA, 19 bp, synthetic construct
  source 1..19: mol_type = other DNA
cctccttattttcctcctg

SEQ ID NO: 37306 - DNA, 19 bp, synthetic construct
  source 1..19: mol_type = other DNA
tcctccttattttcctcct

SEQ ID NO: 37307 - DNA, 19 bp, synthetic construct
  source 1..19: mol_type = other DNA
ctcctccttattttcctcc

SEQ ID NO: 37308 - DNA, 19 bp, synthetic construct
  source 1..19: mol_type = other DNA
cctcctccttattttcctc

SEQ ID NO: 37309 - DNA, 19 bp, synthetic construct
  source 1..19: mol_type = other DNA
tcctcctccttattttcct

SEQ ID NO: 37310 - DNA, 19 bp, synthetic construct
  source 1..19: mol_type = other DNA
ctcctcctccttattttcc

SEQ ID NO: 37311 - DNA, 19 bp, synthetic construct
  source 1..19: mol_type = other DNA
gctcctcctccttattttc

SEQ ID NO: 37312 - DNA, 19 bp, synthetic construct
  source 1..19: mol_type = other DNA
tgctcctcctccttatttt

SEQ ID NO: 37313 - DNA, 19 bp, synthetic construct
  source 1..19: mol_type = other DNA
ctgctcctcctccttattt

SEQ ID NO: 37314 - DNA, 19 bp, synthetic construct
  source 1..19: mol_type = other DNA
tctatttctgctcctcctc

SEQ ID NO: 37315 - DNA, 19 bp, synthetic construct
  source 1..19: mol_type = other DNA
atctatttctgctcctcct

SEQ ID NO: 37316 - DNA, 19 bp, synthetic construct
  source 1..19: mol_type = other DNA
catctatttctgctcctcc

SEQ ID NO: 37317 - DNA, 19 bp, synthetic construct
  source 1..19: mol_type = other DNA
tcatctatttctgctcctc

SEQ ID NO: 37318 - DNA, 19 bp, synthetic construct
  source 1..19: mol_type = other DNA
ctcatctatttctgctcct

SEQ ID NO: 37319 - DNA, 19 bp, synthetic construct
  source 1..19: mol_type = other DNA
cctcatctatttctgctcc

SEQ ID NO: 37320 - DNA, 19 bp, synthetic construct
  source 1..19: mol_type = other DNA
gcctcatctatttctgctc

SEQ ID NO: 37321 - DNA, 19 bp, synthetic construct
  source 1..19: mol_type = other DNA
agcctcatctatttctgct

SEQ ID NO: 37322 - DNA, 19 bp, synthetic construct
  source 1..19: mol_type = other DNA
cagcctcatctatttctgc

SEQ ID NO: 37323 - DNA, 19 bp, synthetic construct
  source 1..19: mol_type = other DNA
ccagcctcatctatttctg

SEQ ID NO: 37324 - DNA, 19 bp, synthetic construct
  source 1..19: mol_type = other DNA
tccagcctcatctatttct

SEQ ID NO: 37325 - DNA, 19 bp, synthetic construct
  source 1..19: mol_type = other DNA
atccagcctcatctatttc

SEQ ID NO: 37326 - DNA, 19 bp, synthetic construct
  source 1..19: mol_type = other DNA
tatccagcctcatctattt

SEQ ID NO: 37327 - DNA, 19 bp, synthetic construct
  source 1..19: mol_type = other DNA
atatccagcctcatctatt

SEQ ID NO: 37328 - DNA, 19 bp, synthetic construct
  source 1..19: mol_type = other DNA
tatatccagcctcatctat

SEQ ID NO: 37329 - DNA, 19 bp, synthetic construct
  source 1..19: mol_type = other DNA
ctatatccagcctcatcta

SEQ ID NO: 37330 - DNA, 19 bp, synthetic construct
  source 1..19: mol_type = other DNA
tctatatccagcctcatct

SEQ ID NO: 37331 - DNA, 19 bp, synthetic construct
  source 1..19: mol_type = other DNA
ttctatatccagcctcatc

SEQ ID NO: 37332 - DNA, 19 bp, synthetic construct
  source 1..19: mol_type = other DNA
cttctatatccagcctcat

SEQ ID NO: 37333 - DNA, 19 bp, synthetic construct
  source 1..19: mol_type = other DNA
gcttctatatccagcctca

SEQ ID NO: 37334 - DNA, 19 bp, synthetic construct
  source 1..19: mol_type = other DNA
tgcttctatatccagcctc

SEQ ID NO: 37335 - DNA, 19 bp, synthetic construct
  source 1..19: mol_type = other DNA
ctgcttctatatccagcct

SEQ ID NO: 37336 - DNA, 19 bp, synthetic construct
  source 1..19: mol_type = other DNA
cctgcttctatatccagcc

SEQ ID NO: 37337 - DNA, 19 bp, synthetic construct
  source 1..19: mol_type = other DNA
ccctgcttctatatccagc

SEQ ID NO: 37338 - DNA, 19 bp, synthetic construct
  source 1..19: mol_type = other DNA
gccctgcttctatatccag

SEQ ID NO: 37339 - DNA, 19 bp, synthetic construct
  source 1..19: mol_type = other DNA
agccctgcttctatatcca

SEQ ID NO: 37340 - DNA, 19 bp, synthetic construct
  source 1..19: mol_type = other DNA
cagccctgcttctatatcc

SEQ ID NO: 37341 - DNA, 19 bp, synthetic construct
  source 1..19: mol_type = other DNA
tcagccctgcttctatatc

SEQ ID NO: 37342 - DNA, 19 bp, synthetic construct
  source 1..19: mol_type = other DNA
ttcagccctgcttctatat

SEQ ID NO: 37343 - DNA, 19 bp, synthetic construct
  source 1..19: mol_type = other DNA
cttcagccctgcttctata

SEQ ID NO: 37344 - DNA, 19 bp, synthetic construct
  source 1..19: mol_type = other DNA
aacacagcttcagccctgc

SEQ ID NO: 37345 - DNA, 19 bp, synthetic construct
  source 1..19: mol_type = other DNA
caacacagcttcagccctg

SEQ ID NO: 37346 - DNA, 19 bp, synthetic construct
  source 1..19: mol_type = other DNA
acaacacagcttcagccct

SEQ ID NO: 37347 - DNA, 19 bp, synthetic construct
  source 1..19: mol_type = other DNA
aacaacacagcttcagccc

SEQ ID NO: 37348 - DNA, 19 bp, synthetic construct
  source 1..19: mol_type = other DNA
aaacaacacagcttcagcc

SEQ ID NO: 37349 - DNA, 19 bp, synthetic construct
  source 1..19: mol_type = other DNA
caaacaacacagcttcagc

SEQ ID NO: 37350 - DNA, 19 bp, synthetic construct
  source 1..19: mol_type = other DNA
cacaaacaacacagcttca

SEQ ID NO: 37351 - DNA, 19 bp, synthetic construct
  source 1..19: mol_type = other DNA
ccacaaacaacacagcttc

SEQ ID NO: 37352 - DNA, 19 bp, synthetic construct
  source 1..19: mol_type = other DNA
accacaaacaacacagctt

SEQ ID NO: 37353 - DNA, 19 bp, synthetic construct
  source 1..19: mol_type = other DNA
taccacaaacaacacagct

SEQ ID NO: 37354 - DNA, 19 bp, synthetic construct
  source 1..19: mol_type = other DNA
ttaccacaaacaacacagc

SEQ ID NO: 37355 - DNA, 19 bp, synthetic construct
  source 1..19: mol_type = other DNA
tcacaactctttaccacaa

SEQ ID NO: 37356 - DNA, 19 bp, synthetic construct
  source 1..19: mol_type = other DNA
atcacaactctttaccaca

SEQ ID NO: 37357 - DNA, 19 bp, synthetic construct
  source 1..19: mol_type = other DNA
aatcacaactctttaccac

SEQ ID NO: 37358 - DNA, 19 bp, synthetic construct
  source 1..19: mol_type = other DNA
gaatcacaactctttacca

SEQ ID NO: 37359 - DNA, 19 bp, synthetic construct
  source 1..19: mol_type = other DNA
agaatcacaactctttacc

SEQ ID NO: 37360 - DNA, 19 bp, synthetic construct
  source 1..19: mol_type = other DNA
ccttctggatagaatcaca

SEQ ID NO: 37361 - DNA, 19 bp, synthetic construct
  source 1..19: mol_type = other DNA
gccttctggatagaatcac

SEQ ID NO: 37362 - DNA, 19 bp, synthetic construct
  source 1..19: mol_type = other DNA
tgccttctggatagaatca

SEQ ID NO: 37363 - DNA, 19 bp, synthetic construct
  source 1..19: mol_type = other DNA
ttgccttctggatagaatc

SEQ ID NO: 37364 - DNA, 19 bp, synthetic construct
  source 1..19: mol_type = other DNA
attgccttctggatagaat

SEQ ID NO: 37365 - DNA, 19 bp, synthetic construct
  source 1..19: mol_type = other DNA
tattgccttctggatagaa

SEQ ID NO: 37366 - DNA, 19 bp, synthetic construct
  source 1..19: mol_type = other DNA
ctattgccttctggataga

SEQ ID NO: 37367 - DNA, 19 bp, synthetic construct
  source 1..19: mol_type = other DNA
cctattgccttctggatag

SEQ ID NO: 37368 - DNA, 19 bp, synthetic construct
  source 1..19: mol_type = other DNA
acctattgccttctggata

SEQ ID NO: 37369 - DNA, 19 bp, synthetic construct
  source 1..19: mol_type = other DNA
tacctattgccttctggat

SEQ ID NO: 37370 - DNA, 19 bp, synthetic construct
  source 1..19: mol_type = other DNA
ctacctattgccttctgga

SEQ ID NO: 37371 - DNA, 19 bp, synthetic construct
  source 1..19: mol_type = other DNA
gctacctattgccttctgg

SEQ ID NO: 37372 - DNA, 19 bp, synthetic construct
  source 1..19: mol_type = other DNA
ccctttgcagaaaatattt

SEQ ID NO: 37373 - DNA, 19 bp, synthetic construct
  source 1..19: mol_type = other DNA
gccctttgcagaaaatatt

SEQ ID NO: 37374 - DNA, 19 bp, synthetic construct
  source 1..19: mol_type = other DNA
agccctttgcagaaaatat

SEQ ID NO: 37375 - DNA, 19 bp, synthetic construct
  source 1..19: mol_type = other DNA
tagccctttgcagaaaata

SEQ ID NO: 37376 - DNA, 19 bp, synthetic construct
  source 1..19: mol_type = other DNA
ttagccctttgcagaaaat

SEQ ID NO: 37377 - DNA, 19 bp, synthetic construct
  source 1..19: mol_type = other DNA
tttagccctttgcagaaaa

SEQ ID NO: 37378 - DNA, 19 bp, synthetic construct
  source 1..19: mol_type = other DNA
atttagccctttgcagaaa

SEQ ID NO: 37379 - DNA, 19 bp, synthetic construct
  source 1..19: mol_type = other DNA
catttagccctttgcagaa

SEQ ID NO: 37380 - DNA, 19 bp, synthetic construct
  source 1..19: mol_type = other DNA
acatttagccctttgcaga

SEQ ID NO: 37381 - DNA, 19 bp, synthetic construct
  source 1..19: mol_type = other DNA
aacatttagccctttgcag

SEQ ID NO: 37382 - DNA, 19 bp, synthetic construct
  source 1..19: mol_type = other DNA
taacatttagccctttgca

SEQ ID NO: 37383 - DNA, 19 bp, synthetic construct
  source 1..19: mol_type = other DNA
ttaacatttagccctttgc

SEQ ID NO: 37384 - DNA, 19 bp, synthetic construct
  source 1..19: mol_type = other DNA
tttaacatttagccctttg

SEQ ID NO: 37385 - DNA, 19 bp, synthetic construct
  source 1..19: mol_type = other DNA
atttaacatttagcccttt

SEQ ID NO: 37386 - DNA, 19 bp, synthetic construct
  source 1..19: mol_type = other DNA
tatttaacatttagccctt

SEQ ID NO: 37387 - DNA, 19 bp, synthetic construct
  source 1..19: mol_type = other DNA
atatttaacatttagccct

SEQ ID NO: 37388 - DNA, 19 bp, synthetic construct
  source 1..19: mol_type = other DNA
ccatatggcttggaaaatt

SEQ ID NO: 37389 - DNA, 19 bp, synthetic construct
  source 1..19: mol_type = other DNA
accatatggcttggaaaat

SEQ ID NO: 37390 - DNA, 19 bp, synthetic construct
  source 1..19: mol_type = other DNA
gaccatatggcttggaaaa

SEQ ID NO: 37391 - DNA, 19 bp, synthetic construct
  source 1..19: mol_type = other DNA
agaccatatggcttggaaa

SEQ ID NO: 37392 - DNA, 19 bp, synthetic construct
  source 1..19: mol_type = other DNA
gagaccatatggcttggaa

SEQ ID NO: 37393 - DNA, 19 bp, synthetic construct
  source 1..19: mol_type = other DNA
agagaccatatggcttgga

SEQ ID NO: 37394 - DNA, 19 bp, synthetic construct
  source 1..19: mol_type = other DNA
gagagaccatatggcttgg

SEQ ID NO: 37395 - DNA, 19 bp, synthetic construct
  source 1..19: mol_type = other DNA
agagagaccatatggcttg

SEQ ID NO: 37396 - DNA, 19 bp, synthetic construct
  source 1..19: mol_type = other DNA
gagagagaccatatggctt

SEQ ID NO: 37397 - DNA, 19 bp, synthetic construct
  source 1..19: mol_type = other DNA
agagagagaccatatggct

SEQ ID NO: 37398 - DNA, 19 bp, synthetic construct
  source 1..19: mol_type = other DNA
gagagagagaccatatggc

SEQ ID NO: 37399 - DNA, 19 bp, synthetic construct
  source 1..19: mol_type = other DNA
tgagagagagaccatatgg

SEQ ID NO: 37400 - DNA, 19 bp, synthetic construct
  source 1..19: mol_type = other DNA
ttgagagagagaccatatg

SEQ ID NO: 37401 - DNA, 19 bp, synthetic construct
  source 1..19: mol_type = other DNA
attgagagagagaccatat

SEQ ID NO: 37402 - DNA, 19 bp, synthetic construct
  source 1..19: mol_type = other DNA
cattgagagagagaccata

SEQ ID NO: 37403 - DNA, 19 bp, synthetic construct
  source 1..19: mol_type = other DNA
tcattgagagagagaccat

SEQ ID NO: 37404 - DNA, 19 bp, synthetic construct
  source 1..19: mol_type = other DNA
gtcattgagagagagacca

SEQ ID NO: 37405 - DNA, 19 bp, synthetic construct
  source 1..19: mol_type = other DNA
agtcattgagagagagacc

SEQ ID NO: 37406 - DNA, 19 bp, synthetic construct
  source 1..19: mol_type = other DNA
gagtcattgagagagagac

SEQ ID NO: 37407 - DNA, 19 bp, synthetic construct
  source 1..19: mol_type = other DNA
tgagtcattgagagagaga

SEQ ID NO: 37408 - DNA, 19 bp, synthetic construct
  source 1..19: mol_type = other DNA
ctgagtcattgagagagag

SEQ ID NO: 37409 - DNA, 19 bp, synthetic construct
  source 1..19: mol_type = other DNA
gctgagtcattgagagaga

SEQ ID NO: 37410 - DNA, 19 bp, synthetic construct
  source 1..19: mol_type = other DNA
agctgagtcattgagagag

SEQ ID NO: 37411 - DNA, 19 bp, synthetic construct
  source 1..19: mol_type = other DNA
gagctgagtcattgagaga

SEQ ID NO: 37412 - DNA, 19 bp, synthetic construct
  source 1..19: mol_type = other DNA
agagctgagtcattgagag

SEQ ID NO: 37413 - DNA, 19 bp, synthetic construct
  source 1..19: mol_type = other DNA
aagagctgagtcattgaga

SEQ ID NO: 37414 - DNA, 19 bp, synthetic construct
  source 1..19: mol_type = other DNA
gaagagctgagtcattgag

SEQ ID NO: 37415 - DNA, 19 bp, synthetic construct
  source 1..19: mol_type = other DNA
ggaagagctgagtcattga

SEQ ID NO: 37416 - DNA, 19 bp, synthetic construct
  source 1..19: mol_type = other DNA
tggaagagctgagtcattg

SEQ ID NO: 37417 - DNA, 19 bp, synthetic construct
  source 1..19: mol_type = other DNA
atggaagagctgagtcatt

SEQ ID NO: 37418 - DNA, 19 bp, synthetic construct
  source 1..19: mol_type = other DNA
aatggaagagctgagtcat

SEQ ID NO: 37419 - DNA, 19 bp, synthetic construct
  source 1..19: mol_type = other DNA
taatggaagagctgagtca

SEQ ID NO: 37420 - DNA, 19 bp, synthetic construct
  source 1..19: mol_type = other DNA
ataatggaagagctgagtc

SEQ ID NO: 37421 - DNA, 19 bp, synthetic construct
  source 1..19: mol_type = other DNA
ggtataatggaagagctga

SEQ ID NO: 37422 - DNA, 19 bp, synthetic construct
  source 1..19: mol_type = other DNA
tggtataatggaagagctg

SEQ ID NO: 37423 - DNA, 19 bp, synthetic construct
  source 1..19: mol_type = other DNA
atggtataatggaagagct

SEQ ID NO: 37424 - DNA, 19 bp, synthetic construct
  source 1..19: mol_type = other DNA
actttcatggtataatgga

SEQ ID NO: 37425 - DNA, 19 bp, synthetic construct
  source 1..19: mol_type = other DNA
gctactttcatggtataat

SEQ ID NO: 37426 - DNA, 19 bp, synthetic construct
  source 1..19: mol_type = other DNA
ggctactttcatggtataa

SEQ ID NO: 37427 - DNA, 19 bp, synthetic construct
  source 1..19: mol_type = other DNA
tggctactttcatggtata

SEQ ID NO: 37428 - DNA, 19 bp, synthetic construct
  source 1..19: mol_type = other DNA
ctggctactttcatggtat

SEQ ID NO: 37429 - DNA, 19 bp, synthetic construct
  source 1..19: mol_type = other DNA
tctggctactttcatggta

SEQ ID NO: 37430 - DNA, 19 bp, synthetic construct
  source 1..19: mol_type = other DNA
ctctggctactttcatggt

SEQ ID NO: 37431 - DNA, 19 bp, synthetic construct
  source 1..19: mol_type = other DNA
tctctggctactttcatgg

SEQ ID NO: 37432 - DNA, 19 bp, synthetic construct
  source 1..19: mol_type = other DNA
gtctctggctactttcatg

SEQ ID NO: 37433 - DNA, 19 bp, synthetic construct
  source 1..19: mol_type = other DNA
cgtctctggctactttcat

SEQ ID NO: 37434 - DNA, 19 bp, synthetic construct
  source 1..19: mol_type = other DNA
acgtctctggctactttca

SEQ ID NO: 37435 - DNA, 19 bp, synthetic construct
  source 1..19: mol_type = other DNA
ctgacacagtctgcgtttg

SEQ ID NO: 37436 - DNA, 19 bp, synthetic construct
  source 1..19: mol_type = other DNA
tctgacacagtctgcgttt

SEQ ID NO: 37437 - DNA, 19 bp, synthetic construct
  source 1..19: mol_type = other DNA
gtctgacacagtctgcgtt

SEQ ID NO: 37438 - DNA, 19 bp, synthetic construct
  source 1..19: mol_type = other DNA
tgtctgacacagtctgcgt

SEQ ID NO: 37439 - DNA, 19 bp, synthetic construct
  source 1..19: mol_type = other DNA
atgtctgacacagtctgcg

SEQ ID NO: 37440 - DNA, 19 bp, synthetic construct
  source 1..19: mol_type = other DNA
tatgtctgacacagtctgc

SEQ ID NO: 37441 - DNA, 19 bp, synthetic construct
  source 1..19: mol_type = other DNA
ctatgtctgacacagtctg

SEQ ID NO: 37442 - DNA, 19 bp, synthetic construct
  source 1..19: mol_type = other DNA
actatgtctgacacagtct

SEQ ID NO: 37443 - DNA, 19 bp, synthetic construct
  source 1..19: mol_type = other DNA
gactatgtctgacacagtc

SEQ ID NO: 37444 - DNA, 19 bp, synthetic construct
  source 1..19: mol_type = other DNA
ggactatgtctgacacagt

SEQ ID NO: 37445 - DNA, 19 bp, synthetic construct
  source 1..19: mol_type = other DNA
tggactatgtctgacacag

SEQ ID NO: 37446 - DNA, 19 bp, synthetic construct
  source 1..19: mol_type = other DNA
atggactatgtctgacaca

SEQ ID NO: 37447 - DNA, 19 bp, synthetic construct
  source 1..19: mol_type = other DNA
catggactatgtctgacac

SEQ ID NO: 37448 - DNA, 19 bp, synthetic construct
  source 1..19: mol_type = other DNA
acatggactatgtctgaca

SEQ ID NO: 37449 - DNA, 19 bp, synthetic construct
  source 1..19: mol_type = other DNA
tacatggactatgtctgac

SEQ ID NO: 37450 - DNA, 19 bp, synthetic construct
  source 1..19: mol_type = other DNA
atacatggactatgtctga

SEQ ID NO: 37451 - DNA, 19 bp, synthetic construct
  source 1..19: mol_type = other DNA
catacatggactatgtctg

SEQ ID NO: 37452 - DNA, 19 bp, synthetic construct
  source 1..19: mol_type = other DNA
ccatacatggactatgtct

SEQ ID NO: 37453 - DNA, 19 bp, synthetic construct
  source 1..19: mol_type = other DNA
accatacatggactatgtc

SEQ ID NO: 37454 - DNA, 19 bp, synthetic construct
  source 1..19: mol_type = other DNA
taccatacatggactatgt

SEQ ID NO: 37455 - DNA, 19 bp, synthetic construct
  source 1..19: mol_type = other DNA
ctaccatacatggactatg

SEQ ID NO: 37456 - DNA, 19 bp, synthetic construct
  source 1..19: mol_type = other DNA
actaccatacatggactat

SEQ ID NO: 37457 - DNA, 19 bp, synthetic construct
  source 1..19: mol_type = other DNA
tctaaaacaaggtgtggca

SEQ ID NO: 37458 - DNA, 19 bp, synthetic construct
  source 1..19: mol_type = other DNA
ttctaaaacaaggtgtggc

SEQ ID NO: 37459 - DNA, 19 bp, synthetic construct
  source 1..19: mol_type = other DNA
gctttctaaaacaaggtgt

SEQ ID NO: 37460 - DNA, 19 bp, synthetic construct
  source 1..19: mol_type = other DNA
acctgagctttctaaaaca

SEQ ID NO: 37461 - DNA, 19 bp, synthetic construct
  source 1..19: mol_type = other DNA
cataaacctgagctttcta

SEQ ID NO: 37462 - DNA, 19 bp, synthetic construct
  source 1..19: mol_type = other DNA
tcataaacctgagctttct

SEQ ID NO: 37463 - DNA, 19 bp, synthetic construct
  source 1..19: mol_type = other DNA
atcataaacctgagctttc

SEQ ID NO: 37464 - DNA, 19 bp, synthetic construct
  source 1..19: mol_type = other DNA
catcataaacctgagcttt

SEQ ID NO: 37465 - DNA, 19 bp, synthetic construct
  source 1..19: mol_type = other DNA
acatcataaacctgagctt

SEQ ID NO: 37466 - DNA, 19 bp, synthetic construct
  source 1..19: mol_type = other DNA
cacatcataaacctgagct

SEQ ID NO: 37467 - DNA, 19 bp, synthetic construct
  source 1..19: mol_type = other DNA
tcacatcataaacctgagc

SEQ ID NO: 37468 - DNA, 19 bp, synthetic construct
  source 1..19: mol_type = other DNA
catcacatcataaacctga

SEQ ID NO: 37469 - DNA, 19 bp, synthetic construct
  source 1..19: mol_type = other DNA
ccatcacatcataaacctg

SEQ ID NO: 37470 - DNA, 19 bp, synthetic construct
  source 1..19: mol_type = other DNA
tccatcacatcataaacct

SEQ ID NO: 37471 - DNA, 19 bp, synthetic construct
  source 1..19: mol_type = other DNA
ctccatcacatcataaacc

SEQ ID NO: 37472 - DNA, 19 bp, synthetic construct
  source 1..19: mol_type = other DNA
tctccatcacatcataaac

SEQ ID NO: 37473 - DNA, 19 bp, synthetic construct
  source 1..19: mol_type = other DNA
ttctccatcacatcataaa

SEQ ID NO: 37474 - DNA, 19 bp, synthetic construct
  source 1..19: mol_type = other DNA
attctccatcacatcataa

SEQ ID NO: 37475 - DNA, 19 bp, synthetic construct
  source 1..19: mol_type = other DNA
aattctccatcacatcata

SEQ ID NO: 37476 - DNA, 19 bp, synthetic construct
  source 1..19: mol_type = other DNA
gaattctccatcacatcat

SEQ ID NO: 37477 - DNA, 19 bp, synthetic construct
  source 1..19: mol_type = other DNA
ggaattctccatcacatca

SEQ ID NO: 37478 - DNA, 19 bp, synthetic construct
  source 1..19: mol_type = other DNA
aggaattctccatcacatc

SEQ ID NO: 37479 - DNA, 19 bp, synthetic construct
  source 1..19: mol_type = other DNA
taggaattctccatcacat

SEQ ID NO: 37480 - DNA, 19 bp, synthetic construct
  source 1..19: mol_type = other DNA
gtaggaattctccatcaca

SEQ ID NO: 37481 - DNA, 19 bp, synthetic construct
  source 1..19: mol_type = other DNA
tgtaggaattctccatcac

SEQ ID NO: 37482 - DNA, 19 bp, synthetic construct
  source 1..19: mol_type = other DNA
ttgtaggaattctccatca

SEQ ID NO: 37483 - DNA, 19 bp, synthetic construct
  source 1..19: mol_type = other DNA
cttgtaggaattctccatc

SEQ ID NO: 37484 - DNA, 19 bp, synthetic construct
  source 1..19: mol_type = other DNA
tcttgtaggaattctccat

SEQ ID NO: 37485 - DNA, 19 bp, synthetic construct
  source 1..19: mol_type = other DNA
ctcttgtaggaattctcca

SEQ ID NO: 37486 - DNA, 19 bp, synthetic construct
  source 1..19: mol_type = other DNA
actcttgtaggaattctcc

SEQ ID NO: 37487 - DNA, 19 bp, synthetic construct
  source 1..19: mol_type = other DNA
aactcttgtaggaattctc

SEQ ID NO: 37488 - DNA, 19 bp, synthetic construct
  source 1..19: mol_type = other DNA
gaactcttgtaggaattct

SEQ ID NO: 37489 - DNA, 19 bp, synthetic construct
  source 1..19: mol_type = other DNA
gttcactctaccatttaaa

SEQ ID NO: 37490 - DNA, 19 bp, synthetic construct
  source 1..19: mol_type = other DNA
tgttcactctaccatttaa

SEQ ID NO: 37491 - DNA, 19 bp, synthetic construct
  source 1..19: mol_type = other DNA
atgttcactctaccattta

SEQ ID NO: 37492 - DNA, 19 bp, synthetic construct
  source 1..19: mol_type = other DNA
tatgttcactctaccattt

SEQ ID NO: 37493 - DNA, 19 bp, synthetic construct
  source 1..19: mol_type = other DNA
gtatgttcactctaccatt

SEQ ID NO: 37494 - DNA, 19 bp, synthetic construct
  source 1..19: mol_type = other DNA
tgtatgttcactctaccat

SEQ ID NO: 37495 - DNA, 19 bp, synthetic construct
  source 1..19: mol_type = other DNA
gtgtatgttcactctacca

SEQ ID NO: 37496 - DNA, 19 bp, synthetic construct
  source 1..19: mol_type = other DNA
agtgtatgttcactctacc

SEQ ID NO: 37497 - DNA, 19 bp, synthetic construct
  source 1..19: mol_type = other DNA
cagtgtatgttcactctac

SEQ ID NO: 37498 - DNA, 19 bp, synthetic construct
  source 1..19: mol_type = other DNA
ccagtgtatgttcactcta

SEQ ID NO: 37499 - DNA, 19 bp, synthetic construct
  source 1..19: mol_type = other DNA
tccagtgtatgttcactct

SEQ ID NO: 37500 - DNA, 19 bp, synthetic construct
  source 1..19: mol_type = other DNA
ttccagtgtatgttcactc

SEQ ID NO: 37501 - DNA, 19 bp, synthetic construct
  source 1..19: mol_type = other DNA
attccagtgtatgttcact

SEQ ID NO: 37502 - DNA, 19 bp, synthetic construct
  source 1..19: mol_type = other DNA
aattccagtgtatgttcac

SEQ ID NO: 37503 - DNA, 19 bp, synthetic construct
  source 1..19: mol_type = other DNA
gaattccagtgtatgttca

SEQ ID NO: 37504 - DNA, 19 bp, synthetic construct
  source 1..19: mol_type = other DNA
agaattccagtgtatgttc

SEQ ID NO: 37505 - DNA, 19 bp, synthetic construct
  source 1..19: mol_type = other DNA
tagaattccagtgtatgtt

SEQ ID NO: 37506 - DNA, 19 bp, synthetic construct
  source 1..19: mol_type = other DNA
atagaattccagtgtatgt

SEQ ID NO: 37507 - DNA, 19 bp, synthetic construct
  source 1..19: mol_type = other DNA
gtatagaattccagtgtat

SEQ ID NO: 37508 - DNA, 19 bp, synthetic construct
  source 1..19: mol_type = other DNA
agtatagaattccagtgta

SEQ ID NO: 37509 - DNA, 19 bp, synthetic construct
  source 1..19: mol_type = other DNA
cagtatagaattccagtgt

SEQ ID NO: 37510 - DNA, 19 bp, synthetic construct
  source 1..19: mol_type = other DNA
gcagtatagaattccagtg

SEQ ID NO: 37511 - DNA, 19 bp, synthetic construct
  source 1..19: mol_type = other DNA
agcagtatagaattccagt

SEQ ID NO: 37512 - DNA, 19 bp, synthetic construct
  source 1..19: mol_type = other DNA
aagcagtatagaattccag

SEQ ID NO: 37513 - DNA, 19 bp, synthetic construct
  source 1..19: mol_type = other DNA
caagcagtatagaattcca

SEQ ID NO: 37514 - DNA, 19 bp, synthetic construct
  source 1..19: mol_type = other DNA
tcaagcagtatagaattcc

SEQ ID NO: 37515 - DNA, 19 bp, synthetic construct
  source 1..19: mol_type = other DNA
gtcaagcagtatagaattc

SEQ ID NO: 37516 - DNA, 19 bp, synthetic construct
  source 1..19: mol_type = other DNA
ggtcaagcagtatagaatt

SEQ ID NO: 37517 - DNA, 19 bp, synthetic construct
  source 1..19: mol_type = other DNA
gggtcaagcagtatagaat

SEQ ID NO: 37518 - DNA, 19 bp, synthetic construct
  source 1..19: mol_type = other DNA
tgggtcaagcagtatagaa

SEQ ID NO: 37519 - DNA, 19 bp, synthetic construct
  source 1..19: mol_type = other DNA
ttgggtcaagcagtataga

SEQ ID NO: 37520 - DNA, 19 bp, synthetic construct
  source 1..19: mol_type = other DNA
cttgggtcaagcagtatag

SEQ ID NO: 37521 - DNA, 19 bp, synthetic construct
  source 1..19: mol_type = other DNA
gcttgggtcaagcagtata

SEQ ID NO: 37522 - DNA, 19 bp, synthetic construct
  source 1..19: mol_type = other DNA
agcttgggtcaagcagtat

SEQ ID NO: 37523 - DNA, 19 bp, synthetic construct
  source 1..19: mol_type = other DNA
aagcttgggtcaagcagta

SEQ ID NO: 37524 - DNA, 19 bp, synthetic construct
  source 1..19: mol_type = other DNA
aaagcttgggtcaagcagt

SEQ ID NO: 37525 - DNA, 19 bp, synthetic construct
  source 1..19: mol_type = other DNA
aaaagcttgggtcaagcag

SEQ ID NO: 37526 - DNA, 19 bp, synthetic construct
  source 1..19: mol_type = other DNA
caaaagcttgggtcaagca

SEQ ID NO: 37527 - DNA, 19 bp, synthetic construct
  source 1..19: mol_type = other DNA
tcaaaagcttgggtcaagc

SEQ ID NO: 37528 - DNA, 19 bp, synthetic construct
  source 1..19: mol_type = other DNA
atcaaaagcttgggtcaag

SEQ ID NO: 37529 - DNA, 19 bp, synthetic construct
  source 1..19: mol_type = other DNA
ctatcaaaagcttgggtca

SEQ ID NO: 37530 - DNA, 19 bp, synthetic construct
  source 1..19: mol_type = other DNA
gctatcaaaagcttgggtc

SEQ ID NO: 37531 - DNA, 19 bp, synthetic construct
  source 1..19: mol_type = other DNA
tgctatcaaaagcttgggt

SEQ ID NO: 37532 - DNA, 19 bp, synthetic construct
  source 1..19: mol_type = other DNA
ttgctatcaaaagcttggg

SEQ ID NO: 37533 - DNA, 19 bp, synthetic construct
  source 1..19: mol_type = other DNA
tttgctatcaaaagcttgg

SEQ ID NO: 37534 - DNA, 19 bp, synthetic construct
  source 1..19: mol_type = other DNA
ccttttgctatcaaaagct

SEQ ID NO: 37535 - DNA, 19 bp, synthetic construct
  source 1..19: mol_type = other DNA
accttttgctatcaaaagc

SEQ ID NO: 37536 - DNA, 19 bp, synthetic construct
  source 1..19: mol_type = other DNA
tctaccttttgctatcaaa

SEQ ID NO: 37537 - DNA, 19 bp, synthetic construct
  source 1..19: mol_type = other DNA
ttctaccttttgctatcaa

SEQ ID NO: 37538 - DNA, 19 bp, synthetic construct
  source 1..19: mol_type = other DNA
tttctaccttttgctatca

SEQ ID NO: 37539 - DNA, 19 bp, synthetic construct
  source 1..19: mol_type = other DNA
ttttctaccttttgctatc

SEQ ID NO: 37540 - DNA, 19 bp, synthetic construct
  source 1..19: mol_type = other DNA
cttttctaccttttgctat

SEQ ID NO: 37541 - DNA, 19 bp, synthetic construct
  source 1..19: mol_type = other DNA
tcttttctaccttttgcta

SEQ ID NO: 37542 - DNA, 19 bp, synthetic construct
  source 1..19: mol_type = other DNA
gtcttttctaccttttgct

SEQ ID NO: 37543 - DNA, 19 bp, synthetic construct
  source 1..19: mol_type = other DNA
tgtcttttctaccttttgc

SEQ ID NO: 37544 - DNA, 19 bp, synthetic construct
  source 1..19: mol_type = other DNA
ctgtcttttctaccttttg

SEQ ID NO: 37545 - DNA, 19 bp, synthetic construct
  source 1..19: mol_type = other DNA
tctgtcttttctacctttt

SEQ ID NO: 37546 - DNA, 19 bp, synthetic construct
  source 1..19: mol_type = other DNA
atctgtcttttctaccttt

SEQ ID NO: 37547 - DNA, 19 bp, synthetic construct
  source 1..19: mol_type = other DNA
acaccctgagctatgacta

SEQ ID NO: 37548 - DNA, 19 bp, synthetic construct
  source 1..19: mol_type = other DNA
aacaccctgagctatgact

SEQ ID NO: 37549 - DNA, 19 bp, synthetic construct
  source 1..19: mol_type = other DNA
aaacaccctgagctatgac

SEQ ID NO: 37550 - DNA, 19 bp, synthetic construct
  source 1..19: mol_type = other DNA
caaacaccctgagctatga

SEQ ID NO: 37551 - DNA, 19 bp, synthetic construct
  source 1..19: mol_type = other DNA
tcaaacaccctgagctatg

SEQ ID NO: 37552 - DNA, 19 bp, synthetic construct
  source 1..19: mol_type = other DNA
gtcaaacaccctgagctat

SEQ ID NO: 37553 - DNA, 19 bp, synthetic construct
  source 1..19: mol_type = other DNA
agtcaaacaccctgagcta

SEQ ID NO: 37554 - DNA, 19 bp, synthetic construct
  source 1..19: mol_type = other DNA
aagtcaaacaccctgagct

SEQ ID NO: 37555 - DNA, 19 bp, synthetic construct
  source 1..19: mol_type = other DNA
gaagtcaaacaccctgagc

SEQ ID NO: 37556 - DNA, 19 bp, synthetic construct
  source 1..19: mol_type = other DNA
agaagtcaaacaccctgag

SEQ ID NO: 37557 - DNA, 19 bp, synthetic construct
  source 1..19: mol_type = other DNA
aagaagtcaaacaccctga

SEQ ID NO: 37558 - DNA, 19 bp, synthetic construct
  source 1..19: mol_type = other DNA
gaagaagtcaaacaccctg

SEQ ID NO: 37559 - DNA, 19 bp, synthetic construct
  source 1..19: mol_type = other DNA
ggaagaagtcaaacaccct

SEQ ID NO: 37560 - DNA, 19 bp, synthetic construct
  source 1..19: mol_type = other DNA
aggaagaagtcaaacaccc

SEQ ID NO: 37561 - DNA, 19 bp, synthetic construct
  source 1..19: mol_type = other DNA
ccccacagaaaagcaaaca

SEQ ID NO: 37562 - DNA, 19 bp, synthetic construct
  source 1..19: mol_type = other DNA
accccacagaaaagcaaac

SEQ ID NO: 37563 - DNA, 19 bp, synthetic construct
  source 1..19: mol_type = other DNA
aaccccacagaaaagcaaa

SEQ ID NO: 37564 - DNA, 19 bp, synthetic construct
  source 1..19: mol_type = other DNA
aaaccccacagaaaagcaa

SEQ ID NO: 37565 - DNA, 19 bp, synthetic construct
  source 1..19: mol_type = other DNA
aaaaccccacagaaaagca

SEQ ID NO: 37566 - DNA, 19 bp, synthetic construct
  source 1..19: mol_type = other DNA
acaacaaaaaccccacaga

SEQ ID NO: 37567 - DNA, 19 bp, synthetic construct
  source 1..19: mol_type = other DNA
gcagtgaaagggaattttt

SEQ ID NO: 37568 - DNA, 19 bp, synthetic construct
  source 1..19: mol_type = other DNA
agcagtgaaagggaatttt

SEQ ID NO: 37569 - DNA, 19 bp, synthetic construct
  source 1..19: mol_type = other DNA
gctgctgtgacaaaaaagc

SEQ ID NO: 37570 - DNA, 19 bp, synthetic construct
  source 1..19: mol_type = other DNA
ggctgctgtgacaaaaaag

SEQ ID NO: 37571 - DNA, 19 bp, synthetic construct
  source 1..19: mol_type = other DNA
caaaggctgctgtgacaaa

SEQ ID NO: 37572 - DNA, 19 bp, synthetic construct
  source 1..19: mol_type = other DNA
acaaaggctgctgtgacaa

SEQ ID NO: 37573 - DNA, 19 bp, synthetic construct
  source 1..19: mol_type = other DNA
gacaaaggctgctgtgaca

SEQ ID NO: 37574 - DNA, 19 bp, synthetic construct
  source 1..19: mol_type = other DNA
cgacaaaggctgctgtgac

SEQ ID NO: 37575 - DNA, 19 bp, synthetic construct
  source 1..19: mol_type = other DNA
gcgacaaaggctgctgtga

SEQ ID NO: 37576 - DNA, 19 bp, synthetic construct
  source 1..19: mol_type = other DNA
agcgacaaaggctgctgtg

SEQ ID NO: 37577 - DNA, 19 bp, synthetic construct
  source 1..19: mol_type = other DNA
aagcgacaaaggctgctgt

SEQ ID NO: 37578 - DNA, 19 bp, synthetic construct
  source 1..19: mol_type = other DNA
gaagcgacaaaggctgctg

SEQ ID NO: 37579 - DNA, 19 bp, synthetic construct
  source 1..19: mol_type = other DNA
tgaagcgacaaaggctgct

SEQ ID NO: 37580 - DNA, 19 bp, synthetic construct
  source 1..19: mol_type = other DNA
ttgaagcgacaaaggctgc

SEQ ID NO: 37581 - DNA, 19 bp, synthetic construct
  source 1..19: mol_type = other DNA
tttgaagcgacaaaggctg

SEQ ID NO: 37582 - DNA, 19 bp, synthetic construct
  source 1..19: mol_type = other DNA
gtttgaagcgacaaaggct

SEQ ID NO: 37583 - DNA, 19 bp, synthetic construct
  source 1..19: mol_type = other DNA
tgtttgaagcgacaaaggc

SEQ ID NO: 37584 - DNA, 19 bp, synthetic construct
  source 1..19: mol_type = other DNA
gtgtttgaagcgacaaagg

SEQ ID NO: 37585 - DNA, 19 bp, synthetic construct
  source 1..19: mol_type = other DNA
ggtgtttgaagcgacaaag

SEQ ID NO: 37586 - DNA, 19 bp, synthetic construct
  source 1..19: mol_type = other DNA
cggtgtttgaagcgacaaa

SEQ ID NO: 37587 - DNA, 19 bp, synthetic construct
  source 1..19: mol_type = other DNA
gcggtgtttgaagcgacaa

SEQ ID NO: 37588 - DNA, 19 bp, synthetic construct
  source 1..19: mol_type = other DNA
tgcggtgtttgaagcgaca

SEQ ID NO: 37589 - DNA, 19 bp, synthetic construct
  source 1..19: mol_type = other DNA
ttgcggtgtttgaagcgac

SEQ ID NO: 37590 - DNA, 19 bp, synthetic construct
  source 1..19: mol_type = other DNA
cttgcggtgtttgaagcga

SEQ ID NO: 37591 - DNA, 19 bp, synthetic construct
  source 1..19: mol_type = other DNA
acttgcggtgtttgaagcg

SEQ ID NO: 37592 - DNA, 19 bp, synthetic construct
  source 1..19: mol_type = other DNA
cacttgcggtgtttgaagc

SEQ ID NO: 37593 - DNA, 19 bp, synthetic construct
  source 1..19: mol_type = other DNA
acacttgcggtgtttgaag

SEQ ID NO: 37594 - DNA, 19 bp, synthetic construct
  source 1..19: mol_type = other DNA
aacacttgcggtgtttgaa

SEQ ID NO: 37595 - DNA, 19 bp, synthetic construct
  source 1..19: mol_type = other DNA
gaacacttgcggtgtttga

SEQ ID NO: 37596 - DNA, 19 bp, synthetic construct
  source 1..19: mol_type = other DNA
agaacacttgcggtgtttg

SEQ ID NO: 37597 - DNA, 19 bp, synthetic construct
  source 1..19: mol_type = other DNA
aagaacacttgcggtgttt

SEQ ID NO: 37598 - DNA, 19 bp, synthetic construct
  source 1..19: mol_type = other DNA
aaagaacacttgcggtgtt

SEQ ID NO: 37599 - DNA, 19 bp, synthetic construct
  source 1..19: mol_type = other DNA
aaaagaacacttgcggtgt

SEQ ID NO: 37600 - DNA, 19 bp, synthetic construct
  source 1..19: mol_type = other DNA
gcatttcacttgaaaggtt

SEQ ID NO: 37601 - DNA, 19 bp, synthetic construct
  source 1..19: mol_type = other DNA
tgcatttcacttgaaaggt

SEQ ID NO: 37602 - DNA, 19 bp, synthetic construct
  source 1..19: mol_type = other DNA
ttgcatttcacttgaaagg

SEQ ID NO: 37603 - DNA, 19 bp, synthetic construct
  source 1..19: mol_type = other DNA
gttgcatttcacttgaaag

SEQ ID NO: 37604 - DNA, 19 bp, synthetic construct
  source 1..19: mol_type = other DNA
tgttgcatttcacttgaaa

SEQ ID NO: 37605 - DNA, 19 bp, synthetic construct
  source 1..19: mol_type = other DNA
atgttgcatttcacttgaa

SEQ ID NO: 37606 - DNA, 19 bp, synthetic construct
  source 1..19: mol_type = other DNA
catgttgcatttcacttga

SEQ ID NO: 37607 - DNA, 19 bp, synthetic construct
  source 1..19: mol_type = other DNA
acatgttgcatttcacttg

SEQ ID NO: 37608 - DNA, 19 bp, synthetic construct
  source 1..19: mol_type = other DNA
gacatgttgcatttcactt

SEQ ID NO: 37609 - DNA, 19 bp, synthetic construct
  source 1..19: mol_type = other DNA
agacatgttgcatttcact

SEQ ID NO: 37610 - DNA, 19 bp, synthetic construct
  source 1..19: mol_type = other DNA
cagacatgttgcatttcac

SEQ ID NO: 37611 - DNA, 19 bp, synthetic construct
  source 1..19: mol_type = other DNA
tcagacatgttgcatttca

SEQ ID NO: 37612 - DNA, 19 bp, synthetic construct
  source 1..19: mol_type = other DNA
ttcagacatgttgcatttc

SEQ ID NO: 37613 - DNA, 19 bp, synthetic construct
  source 1..19: mol_type = other DNA
tttcagacatgttgcattt

SEQ ID NO: 37614 - DNA, 19 bp, synthetic construct
  source 1..19: mol_type = other DNA
gtttcagacatgttgcatt

SEQ ID NO: 37615 - DNA, 19 bp, synthetic construct
  source 1..19: mol_type = other DNA
cgtttcagacatgttgcat

SEQ ID NO: 37616 - DNA, 19 bp, synthetic construct
  source 1..19: mol_type = other DNA
acgtttcagacatgttgca

SEQ ID NO: 37617 - DNA, 19 bp, synthetic construct
  source 1..19: mol_type = other DNA
cacgtttcagacatgttgc

SEQ ID NO: 37618 - DNA, 19 bp, synthetic construct
  source 1..19: mol_type = other DNA
ccacgtttcagacatgttg

SEQ ID NO: 37619 - DNA, 19 bp, synthetic construct
  source 1..19: mol_type = other DNA
accacgtttcagacatgtt

SEQ ID NO: 37620 - DNA, 19 bp, synthetic construct
  source 1..19: mol_type = other DNA
taccacgtttcagacatgt

SEQ ID NO: 37621 - DNA, 19 bp, synthetic construct
  source 1..19: mol_type = other DNA
ataccacgtttcagacatg

SEQ ID NO: 37622 - DNA, 19 bp, synthetic construct
  source 1..19: mol_type = other DNA
gataccacgtttcagacat

SEQ ID NO: 37623 - DNA, 19 bp, synthetic construct
  source 1..19: mol_type = other DNA
agataccacgtttcagaca

SEQ ID NO: 37624 - DNA, 19 bp, synthetic construct
  source 1..19: mol_type = other DNA
cagataccacgtttcagac

SEQ ID NO: 37625 - DNA, 19 bp, synthetic construct
  source 1..19: mol_type = other DNA
ccagataccacgtttcaga

SEQ ID NO: 37626 - DNA, 19 bp, synthetic construct
  source 1..19: mol_type = other DNA
tccagataccacgtttcag

SEQ ID NO: 37627 - DNA, 19 bp, synthetic construct
  source 1..19: mol_type = other DNA
ctccagataccacgtttca

SEQ ID NO: 37628 - DNA, 19 bp, synthetic construct
  source 1..19: mol_type = other DNA
tctccagataccacgtttc

SEQ ID NO: 37629 - DNA, 19 bp, synthetic construct
  source 1..19: mol_type = other DNA
ctctccagataccacgttt

SEQ ID NO: 37630 - DNA, 19 bp, synthetic construct
  source 1..19: mol_type = other DNA
cctctccagataccacgtt

SEQ ID NO: 37631 - DNA, 19 bp, synthetic construct
  source 1..19: mol_type = other DNA
acctctccagataccacgt

SEQ ID NO: 37632 - DNA, 19 bp, synthetic construct
  source 1..19: mol_type = other DNA
cacctctccagataccacg

SEQ ID NO: 37633 - DNA, 19 bp, synthetic construct
  source 1..19: mol_type = other DNA
tcacctctccagataccac

SEQ ID NO: 37634 - DNA, 19 bp, synthetic construct
  source 1..19: mol_type = other DNA
ctcacctctccagatacca

SEQ ID NO: 37635 - DNA, 19 bp, synthetic construct
  source 1..19: mol_type = other DNA
tctcacctctccagatacc

SEQ ID NO: 37636 - DNA, 19 bp, synthetic construct
  source 1..19: mol_type = other DNA
atctcacctctccagatac

SEQ ID NO: 37637 - DNA, 19 bp, synthetic construct
  source 1..19: mol_type = other DNA
catctcacctctccagata

SEQ ID NO: 37638 - DNA, 19 bp, synthetic construct
  source 1..19: mol_type = other DNA
ccatctcacctctccagat

SEQ ID NO: 37639 - DNA, 19 bp, synthetic construct
  source 1..19: mol_type = other DNA
tccatctcacctctccaga

SEQ ID NO: 37640 - DNA, 19 bp, synthetic construct
  source 1..19: mol_type = other DNA
tttgtccatctcacctctc

SEQ ID NO: 37641 - DNA, 19 bp, synthetic construct
  source 1..19: mol_type = other DNA
ctttgtccatctcacctct

SEQ ID NO: 37642 - DNA, 19 bp, synthetic construct
  source 1..19: mol_type = other DNA
cctttgtccatctcacctc

SEQ ID NO: 37643 - DNA, 19 bp, synthetic construct
  source 1..19: mol_type = other DNA
tcctttgtccatctcacct

SEQ ID NO: 37644 - DNA, 19 bp, synthetic construct
  source 1..19: mol_type = other DNA
ctcctttgtccatctcacc

SEQ ID NO: 37645 - DNA, 19 bp, synthetic construct
  source 1..19: mol_type = other DNA
gctcctttgtccatctcac

SEQ ID NO: 37646 - DNA, 19 bp, synthetic construct
  source 1..19: mol_type = other DNA
aagggctcctttgtccatc

SEQ ID NO: 37647 - DNA, 19 bp, synthetic construct
  source 1..19: mol_type = other DNA
caagggctcctttgtccat

SEQ ID NO: 37648 - DNA, 19 bp, synthetic construct
  source 1..19: mol_type = other DNA
acaagggctcctttgtcca

SEQ ID NO: 37649 - DNA, 19 bp, synthetic construct
  source 1..19: mol_type = other DNA
aacaagggctcctttgtcc

SEQ ID NO: 37650 - DNA, 19 bp, synthetic construct
  source 1..19: mol_type = other DNA
taacaagggctcctttgtc

SEQ ID NO: 37651 - DNA, 19 bp, synthetic construct
  source 1..19: mol_type = other DNA
gtaacaagggctcctttgt

SEQ ID NO: 37652 - DNA, 19 bp, synthetic construct
  source 1..19: mol_type = other DNA
agtaacaagggctcctttg

SEQ ID NO: 37653 - DNA, 19 bp, synthetic construct
  source 1..19: mol_type = other DNA
cagtaacaagggctccttt

SEQ ID NO: 37654 - DNA, 19 bp, synthetic construct
  source 1..19: mol_type = other DNA
gcagtaacaagggctcctt

SEQ ID NO: 37655 - DNA, 19 bp, synthetic construct
  source 1..19: mol_type = other DNA
tgcagtaacaagggctcct

SEQ ID NO: 37656 - DNA, 19 bp, synthetic construct
  source 1..19: mol_type = other DNA
gtgcagtaacaagggctcc

SEQ ID NO: 37657 - DNA, 19 bp, synthetic construct
  source 1..19: mol_type = other DNA
cgtgcagtaacaagggctc

SEQ ID NO: 37658 - DNA, 19 bp, synthetic construct
  source 1..19: mol_type = other DNA
acgtgcagtaacaagggct

SEQ ID NO: 37659 - DNA, 19 bp, synthetic construct
  source 1..19: mol_type = other DNA
aacgtgcagtaacaagggc

SEQ ID NO: 37660 - DNA, 19 bp, synthetic construct
  source 1..19: mol_type = other DNA
aaacgtgcagtaacaaggg

SEQ ID NO: 37661 - DNA, 19 bp, synthetic construct
  source 1..19: mol_type = other DNA
ggtgaagtttggagaatga

SEQ ID NO: 37662 - DNA, 19 bp, synthetic construct
  source 1..19: mol_type = other DNA
aggtgaagtttggagaatg

SEQ ID NO: 37663 - DNA, 19 bp, synthetic construct
  source 1..19: mol_type = other DNA
caaggtgaagtttggagaa

SEQ ID NO: 37664 - DNA, 19 bp, synthetic construct
  source 1..19: mol_type = other DNA
gcaaggtgaagtttggaga

SEQ ID NO: 37665 - DNA, 19 bp, synthetic construct
  source 1..19: mol_type = other DNA
tgcaaggtgaagtttggag

SEQ ID NO: 37666 - DNA, 19 bp, synthetic construct
  source 1..19: mol_type = other DNA
gtgcaaggtgaagtttgga

SEQ ID NO: 37667 - DNA, 19 bp, synthetic construct
  source 1..19: mol_type = other DNA
tgtgcaaggtgaagtttgg

SEQ ID NO: 37668 - DNA, 19 bp, synthetic construct
  source 1..19: mol_type = other DNA
gtgtgcaaggtgaagtttg

SEQ ID NO: 37669 - DNA, 19 bp, synthetic construct
  source 1..19: mol_type = other DNA
tgtgtgcaaggtgaagttt

SEQ ID NO: 37670 - DNA, 19 bp, synthetic construct
  source 1..19: mol_type = other DNA
ctgtgtgcaaggtgaagtt

SEQ ID NO: 37671 - DNA, 19 bp, synthetic construct
  source 1..19: mol_type = other DNA
actgtgtgcaaggtgaagt

SEQ ID NO: 37672 - DNA, 19 bp, synthetic construct
  source 1..19: mol_type = other DNA
tactgtgtgcaaggtgaag

SEQ ID NO: 37673 - DNA, 19 bp, synthetic construct
  source 1..19: mol_type = other DNA
ttactgtgtgcaaggtgaa

SEQ ID NO: 37674 - DNA, 19 bp, synthetic construct
  source 1..19: mol_type = other DNA
ttgtgcattgtctgttact

SEQ ID NO: 37675 - DNA, 19 bp, synthetic construct
  source 1..19: mol_type = other DNA
tttgtgcattgtctgttac

SEQ ID NO: 37676 - DNA, 19 bp, synthetic construct
  source 1..19: mol_type = other DNA
atttgtgcattgtctgtta

SEQ ID NO: 37677 - DNA, 19 bp, synthetic construct
  source 1..19: mol_type = other DNA
gatttgtgcattgtctgtt

SEQ ID NO: 37678 - DNA, 19 bp, synthetic construct
  source 1..19: mol_type = other DNA
ggatttgtgcattgtctgt

SEQ ID NO: 37679 - DNA, 19 bp, synthetic construct
  source 1..19: mol_type = other DNA
tggatttgtgcattgtctg

SEQ ID NO: 37680 - DNA, 19 bp, synthetic construct
  source 1..19: mol_type = other DNA
gtggatttgtgcattgtct

SEQ ID NO: 37681 - DNA, 19 bp, synthetic construct
  source 1..19: mol_type = other DNA
agtggatttgtgcattgtc

SEQ ID NO: 37682 - DNA, 19 bp, synthetic construct
  source 1..19: mol_type = other DNA
aagtggatttgtgcattgt

SEQ ID NO: 37683 - DNA, 19 bp, synthetic construct
  source 1..19: mol_type = other DNA
gaagtggatttgtgcattg

SEQ ID NO: 37684 - DNA, 19 bp, synthetic construct
  source 1..19: mol_type = other DNA
ggaagtggatttgtgcatt

SEQ ID NO: 37685 - DNA, 19 bp, synthetic construct
  source 1..19: mol_type = other DNA
aggaagtggatttgtgcat

SEQ ID NO: 37686 - DNA, 19 bp, synthetic construct
  source 1..19: mol_type = other DNA
aaggaagtggatttgtgca

SEQ ID NO: 37687 - DNA, 19 bp, synthetic construct
  source 1..19: mol_type = other DNA
taaggaagtggatttgtgc

SEQ ID NO: 37688 - DNA, 19 bp, synthetic construct
  source 1..19: mol_type = other DNA
ccataaggaagtggatttg

SEQ ID NO: 37689 - DNA, 19 bp, synthetic construct
  source 1..19: mol_type = other DNA
tccataaggaagtggattt

SEQ ID NO: 37690 - DNA, 19 bp, synthetic construct
  source 1..19: mol_type = other DNA
gtccataaggaagtggatt

SEQ ID NO: 37691 - DNA, 19 bp, synthetic construct
  source 1..19: mol_type = other DNA
cgtccataaggaagtggat

SEQ ID NO: 37692 - DNA, 19 bp, synthetic construct
  source 1..19: mol_type = other DNA
ccgtccataaggaagtgga

SEQ ID NO: 37693 - DNA, 19 bp, synthetic construct
  source 1..19: mol_type = other DNA
tccgtccataaggaagtgg

SEQ ID NO: 37694 - DNA, 19 bp, synthetic construct
  source 1..19: mol_type = other DNA
ttccgtccataaggaagtg

SEQ ID NO: 37695 - DNA, 19 bp, synthetic construct
  source 1..19: mol_type = other DNA
tttccgtccataaggaagt

SEQ ID NO: 37696 - DNA, 19 bp, synthetic construct
  source 1..19: mol_type = other DNA
atttccgtccataaggaag

SEQ ID NO: 37697 - DNA, 19 bp, synthetic construct
  source 1..19: mol_type = other DNA
aatttccgtccataaggaa

SEQ ID NO: 37698 - DNA, 19 bp, synthetic construct
  source 1..19: mol_type = other DNA
gaatttccgtccataagga

SEQ ID NO: 37699 - DNA, 19 bp, synthetic construct
  source 1..19: mol_type = other DNA
agaatttccgtccataagg

SEQ ID NO: 37700 - DNA, 19 bp, synthetic construct
  source 1..19: mol_type = other DNA
cagaatttccgtccataag

SEQ ID NO: 37701 - DNA, 19 bp, synthetic construct
  source 1..19: mol_type = other DNA
tcagaatttccgtccataa

SEQ ID NO: 37702 - DNA, 19 bp, synthetic construct
  source 1..19: mol_type = other DNA
ttcagaatttccgtccata

SEQ ID NO: 37703 - DNA, 19 bp, synthetic construct
  source 1..19: mol_type = other DNA
tttcagaatttccgtccat

SEQ ID NO: 37704 - DNA, 19 bp, synthetic construct
  source 1..19: mol_type = other DNA
atttcagaatttccgtcca

SEQ ID NO: 37705 - DNA, 19 bp, synthetic construct
  source 1..19: mol_type = other DNA
gatttcagaatttccgtcc

SEQ ID NO: 37706 - DNA, 19 bp, synthetic construct
  source 1..19: mol_type = other DNA
ggatttcagaatttccgtc

SEQ ID NO: 37707 - DNA, 19 bp, synthetic construct
  source 1..19: mol_type = other DNA
aggatttcagaatttccgt

SEQ ID NO: 37708 - DNA, 19 bp, synthetic construct
  source 1..19: mol_type = other DNA
aaggatttcagaatttccg

SEQ ID NO: 37709 - DNA, 19 bp, synthetic construct
  source 1..19: mol_type = other DNA
ccaggcataaaaggatttc

SEQ ID NO: 37710 - DNA, 19 bp, synthetic construct
  source 1..19: mol_type = other DNA
gccaggcataaaaggattt

SEQ ID NO: 37711 - DNA, 19 bp, synthetic construct
  source 1..19: mol_type = other DNA
ggccaggcataaaaggatt

SEQ ID NO: 37712 - DNA, 19 bp, synthetic construct
  source 1..19: mol_type = other DNA
aggccaggcataaaaggat

SEQ ID NO: 37713 - DNA, 19 bp, synthetic construct
  source 1..19: mol_type = other DNA
aaggccaggcataaaagga

SEQ ID NO: 37714 - DNA, 19 bp, synthetic construct
  source 1..19: mol_type = other DNA
aaaggccaggcataaaagg

SEQ ID NO: 37715 - DNA, 19 bp, synthetic construct
  source 1..19: mol_type = other DNA
gaaaggccaggcataaaag

SEQ ID NO: 37716 - DNA, 19 bp, synthetic construct
  source 1..19: mol_type = other DNA
ggaaaggccaggcataaaa

SEQ ID NO: 37717 - DNA, 19 bp, synthetic construct
  source 1..19: mol_type = other DNA
tggaaaggccaggcataaa

SEQ ID NO: 37718 - DNA, 19 bp, synthetic construct
  source 1..19: mol_type = other DNA
atggaaaggccaggcataa

SEQ ID NO: 37719 - DNA, 19 bp, synthetic construct
  source 1..19: mol_type = other DNA
gatggaaaggccaggcata

SEQ ID NO: 37720 - DNA, 19 bp, synthetic construct
  source 1..19: mol_type = other DNA
ggatggaaaggccaggcat

SEQ ID NO: 37721 - DNA, 19 bp, synthetic construct
  source 1..19: mol_type = other DNA
aggatggaaaggccaggca

SEQ ID NO: 37722 - DNA, 19 bp, synthetic construct
  source 1..19: mol_type = other DNA
aaggatggaaaggccaggc

SEQ ID NO: 37723 - DNA, 19 bp, synthetic construct
  source 1..19: mol_type = other DNA
gaaggatggaaaggccagg

SEQ ID NO: 37724 - DNA, 19 bp, synthetic construct
  source 1..19: mol_type = other DNA
tgaaggatggaaaggccag

SEQ ID NO: 37725 - DNA, 19 bp, synthetic construct
  source 1..19: mol_type = other DNA
ttgaaggatggaaaggcca

SEQ ID NO: 37726 - DNA, 19 bp, synthetic construct
  source 1..19: mol_type = other DNA
gttgaaggatggaaaggcc

SEQ ID NO: 37727 - DNA, 19 bp, synthetic construct
  source 1..19: mol_type = other DNA
agttgaaggatggaaaggc

SEQ ID NO: 37728 - DNA, 19 bp, synthetic construct
  source 1..19: mol_type = other DNA
gggaagttgaaggatggaa

SEQ ID NO: 37729 - DNA, 19 bp, synthetic construct
  source 1..19: mol_type = other DNA
ggggaagttgaaggatgga

SEQ ID NO: 37730 - DNA, 19 bp, synthetic construct
  source 1..19: mol_type = other DNA
aggggaagttgaaggatgg

SEQ ID NO: 37731 - DNA, 19 bp, synthetic construct
  source 1..19: mol_type = other DNA
aaggggaagttgaaggatg

SEQ ID NO: 37732 - DNA, 19 bp, synthetic construct
  source 1..19: mol_type = other DNA
gaaaggggaagttgaagga

SEQ ID NO: 37733 - DNA, 19 bp, synthetic construct
  source 1..19: mol_type = other DNA
ggaaaggggaagttgaagg

SEQ ID NO: 37734 - DNA, 19 bp, synthetic construct
  source 1..19: mol_type = other DNA
gggaaaggggaagttgaag

SEQ ID NO: 37735 - DNA, 19 bp, synthetic construct
  source 1..19: mol_type = other DNA
tgggaaaggggaagttgaa

SEQ ID NO: 37736 - DNA, 19 bp, synthetic construct
  source 1..19: mol_type = other DNA
atgggaaaggggaagttga

SEQ ID NO: 37737 - DNA, 19 bp, synthetic construct
  source 1..19: mol_type = other DNA
catgggaaaggggaagttg

SEQ ID NO: 37738 - DNA, 19 bp, synthetic construct
  source 1..19: mol_type = other DNA
gcatgggaaaggggaagtt

SEQ ID NO: 37739 - DNA, 19 bp, synthetic construct
  source 1..19: mol_type = other DNA
agcatgggaaaggggaagt

SEQ ID NO: 37740 - DNA, 19 bp, synthetic construct
  source 1..19: mol_type = other DNA
cagcatgggaaaggggaag

SEQ ID NO: 37741 - DNA, 19 bp, synthetic construct
  source 1..19: mol_type = other DNA
acagcatgggaaaggggaa

SEQ ID NO: 37742 - DNA, 19 bp, synthetic construct
  source 1..19: mol_type = other DNA
cacagcatgggaaagggga

SEQ ID NO: 37743 - DNA, 19 bp, synthetic construct
  source 1..19: mol_type = other DNA
tcacagcatgggaaagggg

SEQ ID NO: 37744 - DNA, 19 bp, synthetic construct
  source 1..19: mol_type = other DNA
ttcacagcatgggaaaggg

SEQ ID NO: 37745 - DNA, 19 bp, synthetic construct
  source 1..19: mol_type = other DNA
attcacagcatgggaaagg

SEQ ID NO: 37746 - DNA, 19 bp, synthetic construct
  source 1..19: mol_type = other DNA
cattcacagcatgggaaag

SEQ ID NO: 37747 - DNA, 19 bp, synthetic construct
  source 1..19: mol_type = other DNA
tcattcacagcatgggaaa

SEQ ID NO: 37748 - DNA, 19 bp, synthetic construct
  source 1..19: mol_type = other DNA
atcattcacagcatgggaa

SEQ ID NO: 37749 - DNA, 19 bp, synthetic construct
  source 1..19: mol_type = other DNA
aatcattcacagcatggga

SEQ ID NO: 37750 - DNA, 19 bp, synthetic construct
  source 1..19: mol_type = other DNA
caatcattcacagcatggg

SEQ ID NO: 37751 - DNA, 19 bp, synthetic construct
  source 1..19: mol_type = other DNA
acaatcattcacagcatgg

SEQ ID NO: 37752 - DNA, 19 bp, synthetic construct
  source 1..19: mol_type = other DNA
tacaatcattcacagcatg

SEQ ID NO: 37753 - DNA, 19 bp, synthetic construct
  source 1..19: mol_type = other DNA
atacaatcattcacagcat

SEQ ID NO: 37754 - DNA, 19 bp, synthetic construct
  source 1..19: mol_type = other DNA
gtccaatacaatcattcac

SEQ ID NO: 37755 - DNA, 19 bp, synthetic construct
  source 1..19: mol_type = other DNA
tgtccaatacaatcattca

SEQ ID NO: 37756 - DNA, 19 bp, synthetic construct
  source 1..19: mol_type = other DNA
ccctgtcactgagattaaa

SEQ ID NO: 37757 - DNA, 19 bp, synthetic construct
  source 1..19: mol_type = other DNA
cccctgtcactgagattaa

SEQ ID NO: 37758 - DNA, 19 bp, synthetic construct
  source 1..19: mol_type = other DNA
tcccctgtcactgagatta

SEQ ID NO: 37759 - DNA, 19 bp, synthetic construct
  source 1..19: mol_type = other DNA
ttcccctgtcactgagatt

SEQ ID NO: 37760 - DNA, 19 bp, synthetic construct
  source 1..19: mol_type = other DNA
gttcccctgtcactgagat

SEQ ID NO: 37761 - DNA, 19 bp, synthetic construct
  source 1..19: mol_type = other DNA
tgttcccctgtcactgaga

SEQ ID NO: 37762 - DNA, 19 bp, synthetic construct
  source 1..19: mol_type = other DNA
tgtgttcccctgtcactga

SEQ ID NO: 37763 - DNA, 19 bp, synthetic construct
  source 1..19: mol_type = other DNA
tagagctacctgtgttccc

SEQ ID NO: 37764 - DNA, 19 bp, synthetic construct
  source 1..19: mol_type = other DNA
ttagagctacctgtgttcc

SEQ ID NO: 37765 - DNA, 19 bp, synthetic construct
  source 1..19: mol_type = other DNA
attagagctacctgtgttc

SEQ ID NO: 37766 - DNA, 19 bp, synthetic construct
  source 1..19: mol_type = other DNA
tattagagctacctgtgtt

SEQ ID NO: 37767 - DNA, 19 bp, synthetic construct
  source 1..19: mol_type = other DNA
atattagagctacctgtgt

SEQ ID NO: 37768 - DNA, 19 bp, synthetic construct
  source 1..19: mol_type = other DNA
tatattagagctacctgtg

SEQ ID NO: 37769 - DNA, 19 bp, synthetic construct
  source 1..19: mol_type = other DNA
ctatattagagctacctgt

SEQ ID NO: 37770 - DNA, 19 bp, synthetic construct
  source 1..19: mol_type = other DNA
gctatattagagctacctg

SEQ ID NO: 37771 - DNA, 19 bp, synthetic construct
  source 1..19: mol_type = other DNA
agctatattagagctacct

SEQ ID NO: 37772 - DNA, 19 bp, synthetic construct
  source 1..19: mol_type = other DNA
cagctatattagagctacc

SEQ ID NO: 37773 - DNA, 19 bp, synthetic construct
  source 1..19: mol_type = other DNA
acagctatattagagctac

SEQ ID NO: 37774 - DNA, 19 bp, synthetic construct
  source 1..19: mol_type = other DNA
cacagctatattagagcta

SEQ ID NO: 37775 - DNA, 19 bp, synthetic construct
  source 1..19: mol_type = other DNA
tcacagctatattagagct

SEQ ID NO: 37776 - DNA, 19 bp, synthetic construct
  source 1..19: mol_type = other DNA
gtcacagctatattagagc

SEQ ID NO: 37777 - DNA, 19 bp, synthetic construct
  source 1..19: mol_type = other DNA
agtcacagctatattagag

SEQ ID NO: 37778 - DNA, 19 bp, synthetic construct
  source 1..19: mol_type = other DNA
cagtcacagctatattaga

SEQ ID NO: 37779 - DNA, 19 bp, synthetic construct
  source 1..19: mol_type = other DNA
tcagtcacagctatattag

SEQ ID NO: 37780 - DNA, 19 bp, synthetic construct
  source 1..19: mol_type = other DNA
ctcagtcacagctatatta

SEQ ID NO: 37781 - DNA, 19 bp, synthetic construct
  source 1..19: mol_type = other DNA
tctcagtcacagctatatt

SEQ ID NO: 37782 - DNA, 19 bp, synthetic construct
  source 1..19: mol_type = other DNA
atctcagtcacagctatat

SEQ ID NO: 37783 - DNA, 19 bp, synthetic construct
  source 1..19: mol_type = other DNA
cctagaatgcagtggaaag

SEQ ID NO: 37784 - DNA, 19 bp, synthetic construct
  source 1..19: mol_type = other DNA
tcctagaatgcagtggaaa

SEQ ID NO: 37785 - DNA, 19 bp, synthetic construct
  source 1..19: mol_type = other DNA
ttcctagaatgcagtggaa

SEQ ID NO: 37786 - DNA, 19 bp, synthetic construct
  source 1..19: mol_type = other DNA
gttcctagaatgcagtgga

SEQ ID NO: 37787 - DNA, 19 bp, synthetic construct
  source 1..19: mol_type = other DNA
tgttcctagaatgcagtgg

SEQ ID NO: 37788 - DNA, 19 bp, synthetic construct
  source 1..19: mol_type = other DNA
ctgttcctagaatgcagtg

SEQ ID NO: 37789 - DNA, 19 bp, synthetic construct
  source 1..19: mol_type = other DNA
actgttcctagaatgcagt

SEQ ID NO: 37790 - DNA, 19 bp, synthetic construct
  source 1..19: mol_type = other DNA
tactgttcctagaatgcag

SEQ ID NO: 37791 - DNA, 19 bp, synthetic construct
  source 1..19: mol_type = other DNA
ttactgttcctagaatgca

SEQ ID NO: 37792 - DNA, 19 bp, synthetic construct
  source 1..19: mol_type = other DNA
cttactgttcctagaatgc

SEQ ID NO: 37793 - DNA, 19 bp, synthetic construct
  source 1..19: mol_type = other DNA
tcttactgttcctagaatg

SEQ ID NO: 37794 - DNA, 19 bp, synthetic construct
  source 1..19: mol_type = other DNA
ctcttactgttcctagaat

SEQ ID NO: 37795 - DNA, 19 bp, synthetic construct
  source 1..19: mol_type = other DNA
cctcttactgttcctagaa

SEQ ID NO: 37796 - DNA, 19 bp, synthetic construct
  source 1..19: mol_type = other DNA
tcctcttactgttcctaga

SEQ ID NO: 37797 - DNA, 19 bp, synthetic construct
  source 1..19: mol_type = other DNA
gtcctcttactgttcctag

SEQ ID NO: 37798 - DNA, 19 bp, synthetic construct
  source 1..19: mol_type = other DNA
ggtcctcttactgttccta

SEQ ID NO: 37799 - DNA, 19 bp, synthetic construct
  source 1..19: mol_type = other DNA
aggtcctcttactgttcct

SEQ ID NO: 37800 - DNA, 19 bp, synthetic construct
  source 1..19: mol_type = other DNA
aaggtcctcttactgttcc

SEQ ID NO: 37801 - DNA, 19 bp, synthetic construct
  source 1..19: mol_type = other DNA
caaggtcctcttactgttc

SEQ ID NO: 37802 - DNA, 19 bp, synthetic construct
  source 1..19: mol_type = other DNA
acaaggtcctcttactgtt

SEQ ID NO: 37803 - DNA, 19 bp, synthetic construct
  source 1..19: mol_type = other DNA
cacaaggtcctcttactgt

SEQ ID NO: 37804 - DNA, 19 bp, synthetic construct
  source 1..19: mol_type = other DNA
tcacaaggtcctcttactg

SEQ ID NO: 37805 - DNA, 19 bp, synthetic construct
  source 1..19: mol_type = other DNA
ctcacaaggtcctcttact

SEQ ID NO: 37806 - DNA, 19 bp, synthetic construct
  source 1..19: mol_type = other DNA
actcacaaggtcctcttac

SEQ ID NO: 37807 - DNA, 19 bp, synthetic construct
  source 1..19: mol_type = other DNA
cactcacaaggtcctctta

SEQ ID NO: 37808 - DNA, 19 bp, synthetic construct
  source 1..19: mol_type = other DNA
tcactcacaaggtcctctt

SEQ ID NO: 37809 - DNA, 19 bp, synthetic construct
  source 1..19: mol_type = other DNA
ttcactcacaaggtcctct

SEQ ID NO: 37810 - DNA, 19 bp, synthetic construct
  source 1..19: mol_type = other DNA
attcactcacaaggtcctc

SEQ ID NO: 37811 - DNA, 19 bp, synthetic construct
  source 1..19: mol_type = other DNA
tattcactcacaaggtcct

SEQ ID NO: 37812 - DNA, 19 bp, synthetic construct
  source 1..19: mol_type = other DNA
ttattcactcacaaggtcc

SEQ ID NO: 37813 - DNA, 19 bp, synthetic construct
  source 1..19: mol_type = other DNA
attattcactcacaaggtc

SEQ ID NO: 37814 - DNA, 19 bp, synthetic construct
  source 1..19: mol_type = other DNA
ccactctgtaatgtggaaa

SEQ ID NO: 37815 - DNA, 19 bp, synthetic construct
  source 1..19: mol_type = other DNA
cccactctgtaatgtggaa

SEQ ID NO: 37816 - DNA, 19 bp, synthetic construct
  source 1..19: mol_type = other DNA
acccactctgtaatgtgga

SEQ ID NO: 37817 - DNA, 19 bp, synthetic construct
  source 1..19: mol_type = other DNA
tacccactctgtaatgtgg

SEQ ID NO: 37818 - DNA, 19 bp, synthetic construct
  source 1..19: mol_type = other DNA
ttacccactctgtaatgtg

SEQ ID NO: 37819 - DNA, 19 bp, synthetic construct
  source 1..19: mol_type = other DNA
attacccactctgtaatgt

SEQ ID NO: 37820 - DNA, 19 bp, synthetic construct
  source 1..19: mol_type = other DNA
tattacccactctgtaatg

SEQ ID NO: 37821 - DNA, 19 bp, synthetic construct
  source 1..19: mol_type = other DNA
ttattacccactctgtaat

SEQ ID NO: 37822 - DNA, 19 bp, synthetic construct
  source 1..19: mol_type = other DNA
cttattacccactctgtaa

SEQ ID NO: 37823 - DNA, 19 bp, synthetic construct
  source 1..19: mol_type = other DNA
gcttattacccactctgta

SEQ ID NO: 37824 - DNA, 19 bp, synthetic construct
  source 1..19: mol_type = other DNA
tgcttattacccactctgt

SEQ ID NO: 37825 - DNA, 19 bp, synthetic construct
  source 1..19: mol_type = other DNA
ctgcttattacccactctg

SEQ ID NO: 37826 - DNA, 19 bp, synthetic construct
  source 1..19: mol_type = other DNA
tctgcttattacccactct

SEQ ID NO: 37827 - DNA, 19 bp, synthetic construct
  source 1..19: mol_type = other DNA
atctgcttattacccactc

SEQ ID NO: 37828 - DNA, 19 bp, synthetic construct
  source 1..19: mol_type = other DNA
aatctgcttattacccact

SEQ ID NO: 37829 - DNA, 19 bp, synthetic construct
  source 1..19: mol_type = other DNA
taatctgcttattacccac

SEQ ID NO: 37830 - DNA, 19 bp, synthetic construct
  source 1..19: mol_type = other DNA
ctaatctgcttattaccca

SEQ ID NO: 37831 - DNA, 19 bp, synthetic construct
  source 1..19: mol_type = other DNA
actaatctgcttattaccc

SEQ ID NO: 37832 - DNA, 19 bp, synthetic construct
  source 1..19: mol_type = other DNA
tactaatctgcttattacc

SEQ ID NO: 37833 - DNA, 19 bp, synthetic construct
  source 1..19: mol_type = other DNA
gtttttactaatctgctta

SEQ ID NO: 37834 - DNA, 19 bp, synthetic construct
  source 1..19: mol_type = other DNA
tgtttttactaatctgctt

SEQ ID NO: 37835 - DNA, 19 bp, synthetic construct
  source 1..19: mol_type = other DNA
ttgtttttactaatctgct

SEQ ID NO: 37836 - DNA, 20 bp, synthetic construct
  source 1..20: mol_type = other DNA
cggacgcgggcagagagagg

SEQ ID NO: 37837 - DNA, 20 bp, synthetic construct
  source 1..20: mol_type = other DNA
acggacgcgggcagagagag

SEQ ID NO: 37838 - DNA, 20 bp, synthetic construct
  source 1..20: mol_type = other DNA
gacggacgcgggcagagaga

SEQ ID NO: 37839 - DNA, 20 bp, synthetic construct
  source 1..20: mol_type = other DNA
ggacggacgcgggcagagag

SEQ ID NO: 37840 - DNA, 20 bp, synthetic construct
  source 1..20: mol_type = other DNA
cggacggacgcgggcagaga

SEQ ID NO: 37841 - DNA, 20 bp, synthetic construct
  source 1..20: mol_type = other DNA
acggacggacgcgggcagag

SEQ ID NO: 37842 - DNA, 20 bp, synthetic construct
  source 1..20: mol_type = other DNA
cacggacggacgcgggcaga

SEQ ID NO: 37843 - DNA, 20 bp, synthetic construct
  source 1..20: mol_type = other DNA
tcacggacggacgcgggcag

SEQ ID NO: 37844 - DNA, 20 bp, synthetic construct
  source 1..20: mol_type = other DNA
ttcacggacggacgcgggca

SEQ ID NO: 37845 - DNA, 20 bp, synthetic construct
  source 1..20: mol_type = other DNA
tttcacggacggacgcgggc

SEQ ID NO: 37846 - DNA, 20 bp, synthetic construct
  source 1..20: mol_type = other DNA
atttcacggacggacgcggg

SEQ ID NO: 37847 - DNA, 20 bp, synthetic construct
  source 1..20: mol_type = other DNA
aatttcacggacggacgcgg

SEQ ID NO: 37848 - DNA, 20 bp, synthetic construct
  source 1..20: mol_type = other DNA
gaatttcacggacggacgcg

SEQ ID NO: 37849 - DNA, 20 bp, synthetic construct
  source 1..20: mol_type = other DNA
ggaatttcacggacggacgc

SEQ ID NO: 37850 - DNA, 20 bp, synthetic construct
  source 1..20: mol_type = other DNA
cggaatttcacggacggacg

SEQ ID NO: 37851 - DNA, 20 bp, synthetic construct
  source 1..20: mol_type = other DNA
ccggaatttcacggacggac

SEQ ID NO: 37852 - DNA, 20 bp, synthetic construct
  source 1..20: mol_type = other DNA
gccggaatttcacggacgga

SEQ ID NO: 37853 - DNA, 20 bp, synthetic construct
  source 1..20: mol_type = other DNA
ggccggaatttcacggacgg

SEQ ID NO: 37854 - DNA, 20 bp, synthetic construct
  source 1..20: mol_type = other DNA
cggccggaatttcacggacg

SEQ ID NO: 37855 - DNA, 20 bp, synthetic construct
  source 1..20: mol_type = other DNA
ccggccggaatttcacggac

SEQ ID NO: 37856 - DNA, 20 bp, synthetic construct
  source 1..20: mol_type = other DNA
cccggccggaatttcacgga

SEQ ID NO: 37857 - DNA, 20 bp, synthetic construct
  source 1..20: mol_type = other DNA
ccccggccggaatttcacgg

SEQ ID NO: 37858 - DNA, 20 bp, synthetic construct
  source 1..20: mol_type = other DNA
aacgagtctccgtcgccgtc

SEQ ID NO: 37859 - DNA, 20 bp, synthetic construct
  source 1..20: mol_type = other DNA
aaacgagtctccgtcgccgt

SEQ ID NO: 37860 - DNA, 20 bp, synthetic construct
  source 1..20: mol_type = other DNA
caaacgagtctccgtcgccg

SEQ ID NO: 37861 - DNA, 20 bp, synthetic construct
  source 1..20: mol_type = other DNA
ccaaacgagtctccgtcgcc

SEQ ID NO: 37862 - DNA, 20 bp, synthetic construct
  source 1..20: mol_type = other DNA
tccaaacgagtctccgtcgc

SEQ ID NO: 37863 - DNA, 20 bp, synthetic construct
  source 1..20: mol_type = other DNA
gtccaaacgagtctccgtcg

SEQ ID NO: 37864 - DNA, 20 bp, synthetic construct
  source 1..20: mol_type = other DNA
ggtccaaacgagtctccgtc

SEQ ID NO: 37865 - DNA, 20 bp, synthetic construct
  source 1..20: mol_type = other DNA
tcaaagcaggctcgcagggc

SEQ ID NO: 37866 - DNA, 20 bp, synthetic construct
  source 1..20: mol_type = other DNA
ctcaaagcaggctcgcaggg

SEQ ID NO: 37867 - DNA, 20 bp, synthetic construct
  source 1..20: mol_type = other DNA
gctcaaagcaggctcgcagg

SEQ ID NO: 37868 - DNA, 20 bp, synthetic construct
  source 1..20: mol_type = other DNA
cgctcaaagcaggctcgcag

SEQ ID NO: 37869 - DNA, 20 bp, synthetic construct
  source 1..20: mol_type = other DNA
ccgctcaaagcaggctcgca

SEQ ID NO: 37870 - DNA, 20 bp, synthetic construct
  source 1..20: mol_type = other DNA
tccgctcaaagcaggctcgc

SEQ ID NO: 37871 - DNA, 20 bp, synthetic construct
  source 1..20: mol_type = other DNA
ttccgctcaaagcaggctcg

SEQ ID NO: 37872 - DNA, 20 bp, synthetic construct
  source 1..20: mol_type = other DNA
gttccgctcaaagcaggctc

SEQ ID NO: 37873 - DNA, 20 bp, synthetic construct
  source 1..20: mol_type = other DNA
ggttccgctcaaagcaggct

SEQ ID NO: 37874 - DNA, 20 bp, synthetic construct
  source 1..20: mol_type = other DNA
cgggttccgctcaaagcagg

SEQ ID NO: 37875 - DNA, 20 bp, synthetic construct
  source 1..20: mol_type = other DNA
acgggttccgctcaaagcag

SEQ ID NO: 37876 - DNA, 20 bp, synthetic construct
  source 1..20: mol_type = other DNA
tacgggttccgctcaaagca

SEQ ID NO: 37877 - DNA, 20 bp, synthetic construct
  source 1..20: mol_type = other DNA
gtacgggttccgctcaaagc

SEQ ID NO: 37878 - DNA, 20 bp, synthetic construct
  source 1..20: mol_type = other DNA
ggtacgggttccgctcaaag

SEQ ID NO: 37879 - DNA, 20 bp, synthetic construct
  source 1..20: mol_type = other DNA
gggtacgggttccgctcaaa

SEQ ID NO: 37880 - DNA, 20 bp, synthetic construct
  source 1..20: mol_type = other DNA
cgggtacgggttccgctcaa

SEQ ID NO: 37881 - DNA, 20 bp, synthetic construct
  source 1..20: mol_type = other DNA
caaatctggaccctgggctc

SEQ ID NO: 37882 - DNA, 20 bp, synthetic construct
  source 1..20: mol_type = other DNA
ccaaatctggaccctgggct

SEQ ID NO: 37883 - DNA, 20 bp, synthetic construct
  source 1..20: mol_type = other DNA
accaaatctggaccctgggc

SEQ ID NO: 37884 - DNA, 20 bp, synthetic construct
  source 1..20: mol_type = other DNA
aaccaaatctggaccctggg

SEQ ID NO: 37885 - DNA, 20 bp, synthetic construct
  source 1..20: mol_type = other DNA
aaaccaaatctggaccctgg

SEQ ID NO: 37886 - DNA, 20 bp, synthetic construct
  source 1..20: mol_type = other DNA
gaaaccaaatctggaccctg

SEQ ID NO: 37887 - DNA, 20 bp, synthetic construct
  source 1..20: mol_type = other DNA
tgaaaccaaatctggaccct

SEQ ID NO: 37888 - DNA, 20 bp, synthetic construct
  source 1..20: mol_type = other DNA
ctgaaaccaaatctggaccc

SEQ ID NO: 37889 - DNA, 20 bp, synthetic construct
  source 1..20: mol_type = other DNA
tctgaaaccaaatctggacc

SEQ ID NO: 37890 - DNA, 20 bp, synthetic construct
  source 1..20: mol_type = other DNA
ttctgaaaccaaatctggac

SEQ ID NO: 37891 - DNA, 20 bp, synthetic construct
  source 1..20: mol_type = other DNA
ctcattctgaaaccaaatct

SEQ ID NO: 37892 - DNA, 20 bp, synthetic construct
  source 1..20: mol_type = other DNA
ctctcattctgaaaccaaat

SEQ ID NO: 37893 - DNA, 20 bp, synthetic construct
  source 1..20: mol_type = other DNA
cctctcattctgaaaccaaa

SEQ ID NO: 37894 - DNA, 20 bp, synthetic construct
  source 1..20: mol_type = other DNA
acctctcattctgaaaccaa

SEQ ID NO: 37895 - DNA, 20 bp, synthetic construct
  source 1..20: mol_type = other DNA
gacctctcattctgaaacca

SEQ ID NO: 37896 - DNA, 20 bp, synthetic construct
  source 1..20: mol_type = other DNA
tgacctctcattctgaaacc

SEQ ID NO: 37897 - DNA, 20 bp, synthetic construct
  source 1..20: mol_type = other DNA
gtgacctctcattctgaaac

SEQ ID NO: 37898 - DNA, 20 bp, synthetic construct
  source 1..20: mol_type = other DNA
cgtgacctctcattctgaaa

SEQ ID NO: 37899 - DNA, 20 bp, synthetic construct
  source 1..20: mol_type = other DNA
gcgtgacctctcattctgaa

SEQ ID NO: 37900 - DNA, 20 bp, synthetic construct
  source 1..20: mol_type = other DNA
ggcgtgacctctcattctga

SEQ ID NO: 37901 - DNA, 20 bp, synthetic construct
  source 1..20: mol_type = other DNA
tggcgtgacctctcattctg

SEQ ID NO: 37902 - DNA, 20 bp, synthetic construct
  source 1..20: mol_type = other DNA
ctggcgtgacctctcattct

SEQ ID NO: 37903 - DNA, 20 bp, synthetic construct
  source 1..20: mol_type = other DNA
agctggcgtgacctctcatt

SEQ ID NO: 37904 - DNA, 20 bp, synthetic construct
  source 1..20: mol_type = other DNA
aatcctggactccgggaggc

SEQ ID NO: 37905 - DNA, 20 bp, synthetic construct
  source 1..20: mol_type = other DNA
gaatcctggactccgggagg

SEQ ID NO: 37906 - DNA, 20 bp, synthetic construct
  source 1..20: mol_type = other DNA
tgaatcctggactccgggag

SEQ ID NO: 37907 - DNA, 20 bp, synthetic construct
  source 1..20: mol_type = other DNA
ctgaatcctggactccggga

SEQ ID NO: 37908 - DNA, 20 bp, synthetic construct
  source 1..20: mol_type = other DNA
tctgaatcctggactccggg

SEQ ID NO: 37909 - DNA, 20 bp, synthetic construct
  source 1..20: mol_type = other DNA
atctgaatcctggactccgg

SEQ ID NO: 37910 - DNA, 20 bp, synthetic construct
  source 1..20: mol_type = other DNA
gatctgaatcctggactccg

SEQ ID NO: 37911 - DNA, 20 bp, synthetic construct
  source 1..20: mol_type = other DNA
agatctgaatcctggactcc

SEQ ID NO: 37912 - DNA, 20 bp, synthetic construct
  source 1..20: mol_type = other DNA
cagatctgaatcctggactc

SEQ ID NO: 37913 - DNA, 20 bp, synthetic construct
  source 1..20: mol_type = other DNA
ccagatctgaatcctggact

SEQ ID NO: 37914 - DNA, 20 bp, synthetic construct
  source 1..20: mol_type = other DNA
accagatctgaatcctggac

SEQ ID NO: 37915 - DNA, 20 bp, synthetic construct
  source 1..20: mol_type = other DNA
aaccagatctgaatcctgga

SEQ ID NO: 37916 - DNA, 20 bp, synthetic construct
  source 1..20: mol_type = other DNA
aaaccagatctgaatcctgg

SEQ ID NO: 37917 - DNA, 20 bp, synthetic construct
  source 1..20: mol_type = other DNA
gaaaccagatctgaatcctg

SEQ ID NO: 37918 - DNA, 20 bp, synthetic construct
  source 1..20: mol_type = other DNA
tgaaaccagatctgaatcct

SEQ ID NO: 37919 - DNA, 20 bp, synthetic construct
  source 1..20: mol_type = other DNA
ctgaaaccagatctgaatcc

SEQ ID NO: 37920 - DNA, 20 bp, synthetic construct
  source 1..20: mol_type = other DNA
tctgaaaccagatctgaatc

SEQ ID NO: 37921 - DNA, 20 bp, synthetic construct
  source 1..20: mol_type = other DNA
ttctgaaaccagatctgaat

SEQ ID NO: 37922 - DNA, 20 bp, synthetic construct
  source 1..20: mol_type = other DNA
attctgaaaccagatctgaa

SEQ ID NO: 37923 - DNA, 20 bp, synthetic construct
  source 1..20: mol_type = other DNA
gattctgaaaccagatctga

SEQ ID NO: 37924 - DNA, 20 bp, synthetic construct
  source 1..20: mol_type = other DNA
cgattctgaaaccagatctg

SEQ ID NO: 37925 - DNA, 20 bp, synthetic construct
  source 1..20: mol_type = other DNA
tcgattctgaaaccagatct

SEQ ID NO: 37926 - DNA, 20 bp, synthetic construct
  source 1..20: mol_type = other DNA
ttcgattctgaaaccagatc

SEQ ID NO: 37927 - DNA, 20 bp, synthetic construct
  source 1..20: mol_type = other DNA
cttcgattctgaaaccagat

SEQ ID NO: 37928 - DNA, 20 bp, synthetic construct
  source 1..20: mol_type = other DNA
ccttcgattctgaaaccaga

SEQ ID NO: 37929 - DNA, 20 bp, synthetic construct
  source 1..20: mol_type = other DNA
cccttcgattctgaaaccag

SEQ ID NO: 37930 - DNA, 20 bp, synthetic construct
  source 1..20: mol_type = other DNA
gcccttcgattctgaaacca

SEQ ID NO: 37931 - DNA, 20 bp, synthetic construct
  source 1..20: mol_type = other DNA
ggcccttcgattctgaaacc

SEQ ID NO: 37932 - DNA, 20 bp, synthetic construct
  source 1..20: mol_type = other DNA
tggcccttcgattctgaaac

SEQ ID NO: 37933 - DNA, 20 bp, synthetic construct
  source 1..20: mol_type = other DNA
ctggcccttcgattctgaaa

SEQ ID NO: 37934 - DNA, 20 bp, synthetic construct
  source 1..20: mol_type = other DNA
cctggcccttcgattctgaa

SEQ ID NO: 37935 - DNA, 20 bp, synthetic construct
  source 1..20: mol_type = other DNA
tattcttcctcgctgagggg

SEQ ID NO: 37936 - DNA, 20 bp, synthetic construct
  source 1..20: mol_type = other DNA
gtattcttcctcgctgaggg

SEQ ID NO: 37937 - DNA, 20 bp, synthetic construct
  source 1..20: mol_type = other DNA
ggtattcttcctcgctgagg

SEQ ID NO: 37938 - DNA, 20 bp, synthetic construct
  source 1..20: mol_type = other DNA
cggtattcttcctcgctgag

SEQ ID NO: 37939 - DNA, 20 bp, synthetic construct
  source 1..20: mol_type = other DNA
ccggtattcttcctcgctga

SEQ ID NO: 37940 - DNA, 20 bp, synthetic construct
  source 1..20: mol_type = other DNA
agcagagcccggtattcttc

SEQ ID NO: 37941 - DNA, 20 bp, synthetic construct
  source 1..20: mol_type = other DNA
cagcagagcccggtattctt

SEQ ID NO: 37942 - DNA, 20 bp, synthetic construct
  source 1..20: mol_type = other DNA
taaagctcctccagcagagc

SEQ ID NO: 37943 - DNA, 20 bp, synthetic construct
  source 1..20: mol_type = other DNA
ctaaagctcctccagcagag

SEQ ID NO: 37944 - DNA, 20 bp, synthetic construct
  source 1..20: mol_type = other DNA
cctaaagctcctccagcaga

SEQ ID NO: 37945 - DNA, 20 bp, synthetic construct
  source 1..20: mol_type = other DNA
tcctaaagctcctccagcag

SEQ ID NO: 37946 - DNA, 20 bp, synthetic construct
  source 1..20: mol_type = other DNA
cgtcctaaagctcctccagc

SEQ ID NO: 37947 - DNA, 20 bp, synthetic construct
  source 1..20: mol_type = other DNA
gcgtcctaaagctcctccag

SEQ ID NO: 37948 - DNA, 20 bp, synthetic construct
  source 1..20: mol_type = other DNA
cgcgtcctaaagctcctcca

SEQ ID NO: 37949 - DNA, 20 bp, synthetic construct
  source 1..20: mol_type = other DNA
aaccccgcgtcctaaagctc

SEQ ID NO: 37950 - DNA, 20 bp, synthetic construct
  source 1..20: mol_type = other DNA
caaccccgcgtcctaaagct

SEQ ID NO: 37951 - DNA, 20 bp, synthetic construct
  source 1..20: mol_type = other DNA
ccaaccccgcgtcctaaagc

SEQ ID NO: 37952 - DNA, 20 bp, synthetic construct
  source 1..20: mol_type = other DNA
cccaaccccgcgtcctaaag

SEQ ID NO: 37953 - DNA, 20 bp, synthetic construct
  source 1..20: mol_type = other DNA
tcccaaccccgcgtcctaaa

SEQ ID NO: 37954 - DNA, 20 bp, synthetic construct
  source 1..20: mol_type = other DNA
aaagagaggccaccgccctg

SEQ ID NO: 37955 - DNA, 20 bp, synthetic construct
  source 1..20: mol_type = other DNA
gaaagagaggccaccgccct

SEQ ID NO: 37956 - DNA, 20 bp, synthetic construct
  source 1..20: mol_type = other DNA
cgaaagagaggccaccgccc

SEQ ID NO: 37957 - DNA, 20 bp, synthetic construct
  source 1..20: mol_type = other DNA
gcgaaagagaggccaccgcc

SEQ ID NO: 37958 - DNA, 20 bp, synthetic construct
  source 1..20: mol_type = other DNA
cgcgaaagagaggccaccgc

SEQ ID NO: 37959 - DNA, 20 bp, synthetic construct
  source 1..20: mol_type = other DNA
ccgcgaaagagaggccaccg

SEQ ID NO: 37960 - DNA, 20 bp, synthetic construct
  source 1..20: mol_type = other DNA
cccgcgaaagagaggccacc

SEQ ID NO: 37961 - DNA, 20 bp, synthetic construct
  source 1..20: mol_type = other DNA
ccccgcgaaagagaggccac

SEQ ID NO: 37962 - DNA, 20 bp, synthetic construct
  source 1..20: mol_type = other DNA
tccccgcgaaagagaggcca

SEQ ID NO: 37963 - DNA, 20 bp, synthetic construct
  source 1..20: mol_type = other DNA
ttccccgcgaaagagaggcc

SEQ ID NO: 37964 - DNA, 20 bp, synthetic construct
  source 1..20: mol_type = other DNA
gttccccgcgaaagagaggc

SEQ ID NO: 37965 - DNA, 20 bp, synthetic construct
  source 1..20: mol_type = other DNA
tgttccccgcgaaagagagg

SEQ ID NO: 37966 - DNA, 20 bp, synthetic construct
  source 1..20: mol_type = other DNA
gtgttccccgcgaaagagag

SEQ ID NO: 37967 - DNA, 20 bp, synthetic construct
  source 1..20: mol_type = other DNA
ggtgttccccgcgaaagaga

SEQ ID NO: 37968 - DNA, 20 bp, synthetic construct
  source 1..20: mol_type = other DNA
aggtgttccccgcgaaagag

SEQ ID NO: 37969 - DNA, 20 bp, synthetic construct
  source 1..20: mol_type = other DNA
caggtgttccccgcgaaaga

SEQ ID NO: 37970 - DNA, 20 bp, synthetic construct
  source 1..20: mol_type = other DNA
ccaggtgttccccgcgaaag

SEQ ID NO: 37971 - DNA, 20 bp, synthetic construct
  source 1..20: mol_type = other DNA
aaggcaggaatcccaggccg

SEQ ID NO: 37972 - DNA, 20 bp, synthetic construct
  source 1..20: mol_type = other DNA
gaaggcaggaatcccaggcc

SEQ ID NO: 37973 - DNA, 20 bp, synthetic construct
  source 1..20: mol_type = other DNA
agaaggcaggaatcccaggc

SEQ ID NO: 37974 - DNA, 20 bp, synthetic construct
  source 1..20: mol_type = other DNA
tagaaggcaggaatcccagg

SEQ ID NO: 37975 - DNA, 20 bp, synthetic construct
  source 1..20: mol_type = other DNA
ctagaaggcaggaatcccag

SEQ ID NO: 37976 - DNA, 20 bp, synthetic construct
  source 1..20: mol_type = other DNA
cctagaaggcaggaatccca

SEQ ID NO: 37977 - DNA, 20 bp, synthetic construct
  source 1..20: mol_type = other DNA
acctagaaggcaggaatccc

SEQ ID NO: 37978 - DNA, 20 bp, synthetic construct
  source 1..20: mol_type = other DNA
gacctagaaggcaggaatcc

SEQ ID NO: 37979 - DNA, 20 bp, synthetic construct
  source 1..20: mol_type = other DNA
agacctagaaggcaggaatc

SEQ ID NO: 37980 - DNA, 20 bp, synthetic construct
  source 1..20: mol_type = other DNA
ccgggatgcccaggaaagaa

SEQ ID NO: 37981 - DNA, 20 bp, synthetic construct
  source 1..20: mol_type = other DNA
cccgggatgcccaggaaaga

SEQ ID NO: 37982 - DNA, 20 bp, synthetic construct
  source 1..20: mol_type = other DNA
ccccgggatgcccaggaaag

SEQ ID NO: 37983 - DNA, 20 bp, synthetic construct
  source 1..20: mol_type = other DNA
gtatgcttttgaccgccagg

SEQ ID NO: 37984 - DNA, 20 bp, synthetic construct
  source 1..20: mol_type = other DNA
ggtatgcttttgaccgccag

SEQ ID NO: 37985 - DNA, 20 bp, synthetic construct
  source 1..20: mol_type = other DNA
aggtatgcttttgaccgcca

SEQ ID NO: 37986 - DNA, 20 bp, synthetic construct
  source 1..20: mol_type = other DNA
gaggtatgcttttgaccgcc

SEQ ID NO: 37987 - DNA, 20 bp, synthetic construct
  source 1..20: mol_type = other DNA
agaggtatgcttttgaccgc

SEQ ID NO: 37988 - DNA, 20 bp, synthetic construct
  source 1..20: mol_type = other DNA
cagaggtatgcttttgaccg

SEQ ID NO: 37989 - DNA, 20 bp, synthetic construct
  source 1..20: mol_type = other DNA
acagaggtatgcttttgacc

SEQ ID NO: 37990 - DNA, 20 bp, synthetic construct
  source 1..20: mol_type = other DNA
gacagaggtatgcttttgac

SEQ ID NO: 37991 - DNA, 20 bp, synthetic construct
  source 1..20: mol_type = other DNA
agacagaggtatgcttttga

SEQ ID NO: 37992 - DNA, 20 bp, synthetic construct
  source 1..20: mol_type = other DNA
cagacagaggtatgcttttg

SEQ ID NO: 37993 - DNA, 20 bp, synthetic construct
  source 1..20: mol_type = other DNA
acagacagaggtatgctttt

SEQ ID NO: 37994 - DNA, 20 bp, synthetic construct
  source 1..20: mol_type = other DNA
gacagacagaggtatgcttt

SEQ ID NO: 37995 - DNA, 20 bp, synthetic construct
  source 1..20: mol_type = other DNA
agacagacagaggtatgctt

SEQ ID NO: 37996 - DNA, 20 bp, synthetic construct
  source 1..20: mol_type = other DNA
aagacagacagaggtatgct

SEQ ID NO: 37997 - DNA, 20 bp, synthetic construct
  source 1..20: mol_type = other DNA
aaagacagacagaggtatgc

SEQ ID NO: 37998 - DNA, 20 bp, synthetic construct
  source 1..20: mol_type = other DNA
caaagacagacagaggtatg

SEQ ID NO: 37999 - DNA, 20 bp, synthetic construct
  source 1..20: mol_type = other DNA
gcaaagacagacagaggtat

SEQ ID NO: 38000 - DNA, 20 bp, synthetic construct
  source 1..20: mol_type = other DNA
ggcaaagacagacagaggta

SEQ ID NO: 38001 - DNA, 20 bp, synthetic construct
  source 1..20: mol_type = other DNA
gggcaaagacagacagaggt

SEQ ID NO: 38002 - DNA, 20 bp, synthetic construct
  source 1..20: mol_type = other DNA
cgggcaaagacagacagagg

SEQ ID NO: 38003 - DNA, 20 bp, synthetic construct
  source 1..20: mol_type = other DNA
gcgggcaaagacagacagag

SEQ ID NO: 38004 - DNA, 20 bp, synthetic construct
  source 1..20: mol_type = other DNA
agcgggcaaagacagacaga

SEQ ID NO: 38005 - DNA, 20 bp, synthetic construct
  source 1..20: mol_type = other DNA
aagcgggcaaagacagacag

SEQ ID NO: 38006 - DNA, 20 bp, synthetic construct
  source 1..20: mol_type = other DNA
gaagcgggcaaagacagaca

SEQ ID NO: 38007 - DNA, 20 bp, synthetic construct
  source 1..20: mol_type = other DNA
ggaagcgggcaaagacagac

SEQ ID NO: 38008 - DNA, 20 bp, synthetic construct
  source 1..20: mol_type = other DNA
aggaagcgggcaaagacaga

SEQ ID NO: 38009 - DNA, 20 bp, synthetic construct
  source 1..20: mol_type = other DNA
caggaagcgggcaaagacag

SEQ ID NO: 38010 - DNA, 20 bp, synthetic construct
  source 1..20: mol_type = other DNA
ccaggaagcgggcaaagaca

SEQ ID NO: 38011 - DNA, 20 bp, synthetic construct
  source 1..20: mol_type = other DNA
gccaggaagcgggcaaagac

SEQ ID NO: 38012 - DNA, 20 bp, synthetic construct
  source 1..20: mol_type = other DNA
agccaggaagcgggcaaaga

SEQ ID NO: 38013 - DNA, 20 bp, synthetic construct
  source 1..20: mol_type = other DNA
tagccaggaagcgggcaaag

SEQ ID NO: 38014 - DNA, 20 bp, synthetic construct
  source 1..20: mol_type = other DNA
ctagccaggaagcgggcaaa

SEQ ID NO: 38015 - DNA, 20 bp, synthetic construct
  source 1..20: mol_type = other DNA
tctagccaggaagcgggcaa

SEQ ID NO: 38016 - DNA, 20 bp, synthetic construct
  source 1..20: mol_type = other DNA
aggtctagccaggaagcggg

SEQ ID NO: 38017 - DNA, 20 bp, synthetic construct
  source 1..20: mol_type = other DNA
caggtctagccaggaagcgg

SEQ ID NO: 38018 - DNA, 20 bp, synthetic construct
  source 1..20: mol_type = other DNA
gcaggtctagccaggaagcg

SEQ ID NO: 38019 - DNA, 20 bp, synthetic construct
  source 1..20: mol_type = other DNA
cgcaggtctagccaggaagc

SEQ ID NO: 38020 - DNA, 20 bp, synthetic construct
  source 1..20: mol_type = other DNA
cacagagaggccagcgagct

SEQ ID NO: 38021 - DNA, 20 bp, synthetic construct
  source 1..20: mol_type = other DNA
aagggcacagagaggccagc

SEQ ID NO: 38022 - DNA, 20 bp, synthetic construct
  source 1..20: mol_type = other DNA
caagggcacagagaggccag

SEQ ID NO: 38023 - DNA, 20 bp, synthetic construct
  source 1..20: mol_type = other DNA
acaagggcacagagaggcca

SEQ ID NO: 38024 - DNA, 20 bp, synthetic construct
  source 1..20: mol_type = other DNA
aacaagggcacagagaggcc

SEQ ID NO: 38025 - DNA, 20 bp, synthetic construct
  source 1..20: mol_type = other DNA
ttcagccagaatttcacgga

SEQ ID NO: 38026 - DNA, 20 bp, synthetic construct
  source 1..20: mol_type = other DNA
attcagccagaatttcacgg

SEQ ID NO: 38027 - DNA, 20 bp, synthetic construct
  source 1..20: mol_type = other DNA
cattcagccagaatttcacg

SEQ ID NO: 38028 - DNA, 20 bp, synthetic construct
  source 1..20: mol_type = other DNA
acattcagccagaatttcac

SEQ ID NO: 38029 - DNA, 20 bp, synthetic construct
  source 1..20: mol_type = other DNA
gacattcagccagaatttca

SEQ ID NO: 38030 - DNA, 20 bp, synthetic construct
  source 1..20: mol_type = other DNA
agacattcagccagaatttc

SEQ ID NO: 38031 - DNA, 20 bp, synthetic construct
  source 1..20: mol_type = other DNA
gagacattcagccagaattt

SEQ ID NO: 38032 - DNA, 20 bp, synthetic construct
  source 1..20: mol_type = other DNA
ggagacattcagccagaatt

SEQ ID NO: 38033 - DNA, 20 bp, synthetic construct
  source 1..20: mol_type = other DNA
gggagacattcagccagaat

SEQ ID NO: 38034 - DNA, 20 bp, synthetic construct
  source 1..20: mol_type = other DNA
ggggagacattcagccagaa

SEQ ID NO: 38035 - DNA, 20 bp, synthetic construct
  source 1..20: mol_type = other DNA
gggggagacattcagccaga

SEQ ID NO: 38036 - DNA, 20 bp, synthetic construct
  source 1..20: mol_type = other DNA
ggggggagacattcagccag

SEQ ID NO: 38037 - DNA, 20 bp, synthetic construct
  source 1..20: mol_type = other DNA
tggggggagacattcagcca

SEQ ID NO: 38038 - DNA, 20 bp, synthetic construct
  source 1..20: mol_type = other DNA
aggtggggggagacattcag

SEQ ID NO: 38039 - DNA, 20 bp, synthetic construct
  source 1..20: mol_type = other DNA
aaggtggggggagacattca

SEQ ID NO: 38040 - DNA, 20 bp, synthetic construct
  source 1..20: mol_type = other DNA
gaaggtggggggagacattc

SEQ ID NO: 38041 - DNA, 20 bp, synthetic construct
  source 1..20: mol_type = other DNA
ggaaggtggggggagacatt

SEQ ID NO: 38042 - DNA, 20 bp, synthetic construct
  source 1..20: mol_type = other DNA
cggaaggtggggggagacat

SEQ ID NO: 38043 - DNA, 20 bp, synthetic construct
  source 1..20: mol_type = other DNA
tcggaaggtggggggagaca

SEQ ID NO: 38044 - DNA, 20 bp, synthetic construct
  source 1..20: mol_type = other DNA
gtcggaaggtggggggagac

SEQ ID NO: 38045 - DNA, 20 bp, synthetic construct
  source 1..20: mol_type = other DNA
cgtcggaaggtggggggaga

SEQ ID NO: 38046 - DNA, 20 bp, synthetic construct
  source 1..20: mol_type = other DNA
acagcgtcggaaggtggggg

SEQ ID NO: 38047 - DNA, 20 bp, synthetic construct
  source 1..20: mol_type = other DNA
gacagcgtcggaaggtgggg

SEQ ID NO: 38048 - DNA, 20 bp, synthetic construct
  source 1..20: mol_type = other DNA
agacagcgtcggaaggtggg

SEQ ID NO: 38049 - DNA, 20 bp, synthetic construct
  source 1..20: mol_type = other DNA
tagacagcgtcggaaggtgg

SEQ ID NO: 38050 - DNA, 20 bp, synthetic construct
  source 1..20: mol_type = other DNA
ctagacagcgtcggaaggtg

SEQ ID NO: 38051 - DNA, 20 bp, synthetic construct
  source 1..20: mol_type = other DNA
cctagacagcgtcggaaggt

SEQ ID NO: 38052 - DNA, 20 bp, synthetic construct
  source 1..20: mol_type = other DNA
gcctagacagcgtcggaagg

SEQ ID NO: 38053 - DNA, 20 bp, synthetic construct
  source 1..20: mol_type = other DNA
tgcctagacagcgtcggaag

SEQ ID NO: 38054 - DNA, 20 bp, synthetic construct
  source 1..20: mol_type = other DNA
ttgcctagacagcgtcggaa

SEQ ID NO: 38055 - DNA, 20 bp, synthetic construct
  source 1..20: mol_type = other DNA
tttgcctagacagcgtcgga

SEQ ID NO: 38056 - DNA, 20 bp, synthetic construct
  source 1..20: mol_type = other DNA
gtttgcctagacagcgtcgg

SEQ ID NO: 38057 - DNA, 20 bp, synthetic construct
  source 1..20: mol_type = other DNA
ggtttgcctagacagcgtcg

SEQ ID NO: 38058 - DNA, 20 bp, synthetic construct
  source 1..20: mol_type = other DNA
aggtttgcctagacagcgtc

SEQ ID NO: 38059 - DNA, 20 bp, synthetic construct
  source 1..20: mol_type = other DNA
caggtttgcctagacagcgt

SEQ ID NO: 38060 - DNA, 20 bp, synthetic construct
  source 1..20: mol_type = other DNA
ccaggtttgcctagacagcg

SEQ ID NO: 38061 - DNA, 20 bp, synthetic construct
  source 1..20: mol_type = other DNA
tccaggtttgcctagacagc

SEQ ID NO: 38062 - DNA, 20 bp, synthetic construct
  source 1..20: mol_type = other DNA
atccaggtttgcctagacag

SEQ ID NO: 38063 - DNA, 20 bp, synthetic construct
  source 1..20: mol_type = other DNA
aatccaggtttgcctagaca

SEQ ID NO: 38064 - DNA, 20 bp, synthetic construct
  source 1..20: mol_type = other DNA
taatccaggtttgcctagac

SEQ ID NO: 38065 - DNA, 20 bp, synthetic construct
  source 1..20: mol_type = other DNA
ctaatccaggtttgcctaga

SEQ ID NO: 38066 - DNA, 20 bp, synthetic construct
  source 1..20: mol_type = other DNA
tctaatccaggtttgcctag

SEQ ID NO: 38067 - DNA, 20 bp, synthetic construct
  source 1..20: mol_type = other DNA
ctctaatccaggtttgccta

SEQ ID NO: 38068 - DNA, 20 bp, synthetic construct
  source 1..20: mol_type = other DNA
actctaatccaggtttgcct

SEQ ID NO: 38069 - DNA, 20 bp, synthetic construct
  source 1..20: mol_type = other DNA
aactctaatccaggtttgcc

SEQ ID NO: 38070 - DNA, 20 bp, synthetic construct
  source 1..20: mol_type = other DNA
taactctaatccaggtttgc

SEQ ID NO: 38071 - DNA, 20 bp, synthetic construct
  source 1..20: mol_type = other DNA
gtaactctaatccaggtttg

SEQ ID NO: 38072 - DNA, 20 bp, synthetic construct
  source 1..20: mol_type = other DNA
tgtaactctaatccaggttt

SEQ ID NO: 38073 - DNA, 20 bp, synthetic construct
  source 1..20: mol_type = other DNA
atgtaactctaatccaggtt

SEQ ID NO: 38074 - DNA, 20 bp, synthetic construct
  source 1..20: mol_type = other DNA
gatgtaactctaatccaggt

SEQ ID NO: 38075 - DNA, 20 bp, synthetic construct
  source 1..20: mol_type = other DNA
agatgtaactctaatccagg

SEQ ID NO: 38076 - DNA, 20 bp, synthetic construct
  source 1..20: mol_type = other DNA
gagatgtaactctaatccag

SEQ ID NO: 38077 - DNA, 20 bp, synthetic construct
  source 1..20: mol_type = other DNA
ggagatgtaactctaatcca

SEQ ID NO: 38078 - DNA, 20 bp, synthetic construct
  source 1..20: mol_type = other DNA
aggagatgtaactctaatcc

SEQ ID NO: 38079 - DNA, 20 bp, synthetic construct
  source 1..20: mol_type = other DNA
caggagatgtaactctaatc

SEQ ID NO: 38080 - DNA, 20 bp, synthetic construct
  source 1..20: mol_type = other DNA
ccaggagatgtaactctaat

SEQ ID NO: 38081 - DNA, 20 bp, synthetic construct
  source 1..20: mol_type = other DNA
tccaggagatgtaactctaa

SEQ ID NO: 38082 - DNA, 20 bp, synthetic construct
  source 1..20: mol_type = other DNA
atccaggagatgtaactcta

SEQ ID NO: 38083 - DNA, 20 bp, synthetic construct
  source 1..20: mol_type = other DNA
catccaggagatgtaactct

SEQ ID NO: 38084 - DNA, 20 bp, synthetic construct
  source 1..20: mol_type = other DNA
tcatccaggagatgtaactc

SEQ ID NO: 38085 - DNA, 20 bp, synthetic construct
  source 1..20: mol_type = other DNA
atcatccaggagatgtaact

SEQ ID NO: 38086 - DNA, 20 bp, synthetic construct
  source 1..20: mol_type = other DNA
aatcatccaggagatgtaac

SEQ ID NO: 38087 - DNA, 20 bp, synthetic construct
  source 1..20: mol_type = other DNA
taatcatccaggagatgtaa

SEQ ID NO: 38088 - DNA, 20 bp, synthetic construct
  source 1..20: mol_type = other DNA
ctaatcatccaggagatgta

SEQ ID NO: 38089 - DNA, 20 bp, synthetic construct
  source 1..20: mol_type = other DNA
actaatcatccaggagatgt

SEQ ID NO: 38090 - DNA, 20 bp, synthetic construct
  source 1..20: mol_type = other DNA
aactaatcatccaggagatg

SEQ ID NO: 38091 - DNA, 20 bp, synthetic construct
  source 1..20: mol_type = other DNA
gaactaatcatccaggagat

SEQ ID NO: 38092 - DNA, 20 bp, synthetic construct
  source 1..20: mol_type = other DNA
tgaactaatcatccaggaga

SEQ ID NO: 38093 - DNA, 20 bp, synthetic construct
  source 1..20: mol_type = other DNA
ctgaactaatcatccaggag

SEQ ID NO: 38094 - DNA, 20 bp, synthetic construct
  source 1..20: mol_type = other DNA
tctgaactaatcatccagga

SEQ ID NO: 38095 - DNA, 20 bp, synthetic construct
  source 1..20: mol_type = other DNA
ctctgaactaatcatccagg

SEQ ID NO: 38096 - DNA, 20 bp, synthetic construct
  source 1..20: mol_type = other DNA
tctctgaactaatcatccag

SEQ ID NO: 38097 - DNA, 20 bp, synthetic construct
  source 1..20: mol_type = other DNA
atctctgaactaatcatcca

SEQ ID NO: 38098 - DNA, 20 bp, synthetic construct
  source 1..20: mol_type = other DNA
tatctctgaactaatcatcc

SEQ ID NO: 38099 - DNA, 20 bp, synthetic construct
  source 1..20: mol_type = other DNA
ccacagggagggggcatttt

SEQ ID NO: 38100 - DNA, 20 bp, synthetic construct
  source 1..20: mol_type = other DNA
taggatccacagggaggggg

SEQ ID NO: 38101 - DNA, 20 bp, synthetic construct
  source 1..20: mol_type = other DNA
ataggatccacagggagggg

SEQ ID NO: 38102 - DNA, 20 bp, synthetic construct
  source 1..20: mol_type = other DNA
tataggatccacagggaggg

SEQ ID NO: 38103 - DNA, 20 bp, synthetic construct
  source 1..20: mol_type = other DNA
ctataggatccacagggagg

SEQ ID NO: 38104 - DNA, 20 bp, synthetic construct
  source 1..20: mol_type = other DNA
tctataggatccacagggag

SEQ ID NO: 38105 - DNA, 20 bp, synthetic construct
  source 1..20: mol_type = other DNA
ttctataggatccacaggga

SEQ ID NO: 38106 - DNA, 20 bp, synthetic construct
  source 1..20: mol_type = other DNA
cttctataggatccacaggg

SEQ ID NO: 38107 - DNA, 20 bp, synthetic construct
  source 1..20: mol_type = other DNA
tcttctataggatccacagg

SEQ ID NO: 38108 - DNA, 20 bp, synthetic construct
  source 1..20: mol_type = other DNA
atcttctataggatccacag

SEQ ID NO: 38109 - DNA, 20 bp, synthetic construct
  source 1..20: mol_type = other DNA
aatcttctataggatccaca

SEQ ID NO: 38110 - DNA, 20 bp, synthetic construct
  source 1..20: mol_type = other DNA
aaatcttctataggatccac

SEQ ID NO: 38111 - DNA, 20 bp, synthetic construct
  source 1..20: mol_type = other DNA
caaatcttctataggatcca

SEQ ID NO: 38112 - DNA, 20 bp, synthetic construct
  source 1..20: mol_type = other DNA
gcaaatcttctataggatcc

SEQ ID NO: 38113 - DNA, 20 bp, synthetic construct
  source 1..20: mol_type = other DNA
tgcaaatcttctataggatc

SEQ ID NO: 38114 - DNA, 20 bp, synthetic construct
  source 1..20: mol_type = other DNA
atgcaaatcttctataggat

SEQ ID NO: 38115 - DNA, 20 bp, synthetic construct
  source 1..20: mol_type = other DNA
gatgcaaatcttctatagga

SEQ ID NO: 38116 - DNA, 20 bp, synthetic construct
  source 1..20: mol_type = other DNA
agatgcaaatcttctatagg

SEQ ID NO: 38117 - DNA, 20 bp, synthetic construct
  source 1..20: mol_type = other DNA
ctcatcacacaaaagatgca

SEQ ID NO: 38118 - DNA, 20 bp, synthetic construct
  source 1..20: mol_type = other DNA
actcatcacacaaaagatgc

SEQ ID NO: 38119 - DNA, 20 bp, synthetic construct
  source 1..20: mol_type = other DNA
gcactcatcacacaaaagat

SEQ ID NO: 38120 - DNA, 20 bp, synthetic construct
  source 1..20: mol_type = other DNA
tgcactcatcacacaaaaga

SEQ ID NO: 38121 - DNA, 20 bp, synthetic construct
  source 1..20: mol_type = other DNA
ctgcactcatcacacaaaag

SEQ ID NO: 38122 - DNA, 20 bp, synthetic construct
  source 1..20: mol_type = other DNA
tctgcactcatcacacaaaa

SEQ ID NO: 38123 - DNA, 20 bp, synthetic construct
  source 1..20: mol_type = other DNA
ctctgcactcatcacacaaa

SEQ ID NO: 38124 - DNA, 20 bp, synthetic construct
  source 1..20: mol_type = other DNA
tctctgcactcatcacacaa

SEQ ID NO: 38125 - DNA, 20 bp, synthetic construct
  source 1..20: mol_type = other DNA
atctctgcactcatcacaca

SEQ ID NO: 38126 - DNA, 20 bp, synthetic construct
  source 1..20: mol_type = other DNA
tatctctgcactcatcacac

SEQ ID NO: 38127 - DNA, 20 bp, synthetic construct
  source 1..20: mol_type = other DNA
atatctctgcactcatcaca

SEQ ID NO: 38128 - DNA, 20 bp, synthetic construct
  source 1..20: mol_type = other DNA
catatctctgcactcatcac

SEQ ID NO: 38129 - DNA, 20 bp, synthetic construct
  source 1..20: mol_type = other DNA
acatatctctgcactcatca

SEQ ID NO: 38130 - DNA, 20 bp, synthetic construct
  source 1..20: mol_type = other DNA
gacatatctctgcactcatc

SEQ ID NO: 38131 - DNA, 20 bp, synthetic construct
  source 1..20: mol_type = other DNA
tgacatatctctgcactcat

SEQ ID NO: 38132 - DNA, 20 bp, synthetic construct
  source 1..20: mol_type = other DNA
gtgacatatctctgcactca

SEQ ID NO: 38133 - DNA, 20 bp, synthetic construct
  source 1..20: mol_type = other DNA
tgtgacatatctctgcactc

SEQ ID NO: 38134 - DNA, 20 bp, synthetic construct
  source 1..20: mol_type = other DNA
ttgtgacatatctctgcact

SEQ ID NO: 38135 - DNA, 20 bp, synthetic construct
  source 1..20: mol_type = other DNA
attgtgacatatctctgcac

SEQ ID NO: 38136 - DNA, 20 bp, synthetic construct
  source 1..20: mol_type = other DNA
tattgtgacatatctctgca

SEQ ID NO: 38137 - DNA, 20 bp, synthetic construct
  source 1..20: mol_type = other DNA
atattgtgacatatctctgc

SEQ ID NO: 38138 - DNA, 20 bp, synthetic construct
  source 1..20: mol_type = other DNA
gatattgtgacatatctctg

SEQ ID NO: 38139 - DNA, 20 bp, synthetic construct
  source 1..20: mol_type = other DNA
ggatattgtgacatatctct

SEQ ID NO: 38140 - DNA, 20 bp, synthetic construct
  source 1..20: mol_type = other DNA
gggatattgtgacatatctc

SEQ ID NO: 38141 - DNA, 20 bp, synthetic construct
  source 1..20: mol_type = other DNA
ggggatattgtgacatatct

SEQ ID NO: 38142 - DNA, 20 bp, synthetic construct
  source 1..20: mol_type = other DNA
aggggatattgtgacatatc

SEQ ID NO: 38143 - DNA, 20 bp, synthetic construct
  source 1..20: mol_type = other DNA
caggggatattgtgacatat

SEQ ID NO: 38144 - DNA, 20 bp, synthetic construct
  source 1..20: mol_type = other DNA
acaggggatattgtgacata

SEQ ID NO: 38145 - DNA, 20 bp, synthetic construct
  source 1..20: mol_type = other DNA
tacaggggatattgtgacat

SEQ ID NO: 38146 - DNA, 20 bp, synthetic construct
  source 1..20: mol_type = other DNA
ctacaggggatattgtgaca

SEQ ID NO: 38147 - DNA, 20 bp, synthetic construct
  source 1..20: mol_type = other DNA
tctacaggggatattgtgac

SEQ ID NO: 38148 - DNA, 20 bp, synthetic construct
  source 1..20: mol_type = other DNA
ttctacaggggatattgtga

SEQ ID NO: 38149 - DNA, 20 bp, synthetic construct
  source 1..20: mol_type = other DNA
tttctacaggggatattgtg

SEQ ID NO: 38150 - DNA, 20 bp, synthetic construct
  source 1..20: mol_type = other DNA
ttttctacaggggatattgt

SEQ ID NO: 38151 - DNA, 20 bp, synthetic construct
  source 1..20: mol_type = other DNA
tttttctacaggggatattg

SEQ ID NO: 38152 - DNA, 20 bp, synthetic construct
  source 1..20: mol_type = other DNA
ctttttctacaggggatatt

SEQ ID NO: 38153 - DNA, 20 bp, synthetic construct
  source 1..20: mol_type = other DNA
gctttttctacaggggatat

SEQ ID NO: 38154 - DNA, 20 bp, synthetic construct
  source 1..20: mol_type = other DNA
ggctttttctacaggggata

SEQ ID NO: 38155 - DNA, 20 bp, synthetic construct
  source 1..20: mol_type = other DNA
aggctttttctacaggggat

SEQ ID NO: 38156 - DNA, 20 bp, synthetic construct
  source 1..20: mol_type = other DNA
caggctttttctacagggga

SEQ ID NO: 38157 - DNA, 20 bp, synthetic construct
  source 1..20: mol_type = other DNA
tcaggctttttctacagggg

SEQ ID NO: 38158 - DNA, 20 bp, synthetic construct
  source 1..20: mol_type = other DNA
ttcaggctttttctacaggg

SEQ ID NO: 38159 - DNA, 20 bp, synthetic construct
  source 1..20: mol_type = other DNA
tttcaggctttttctacagg

SEQ ID NO: 38160 - DNA, 20 bp, synthetic construct
  source 1..20: mol_type = other DNA
atttcaggctttttctacag

SEQ ID NO: 38161 - DNA, 20 bp, synthetic construct
  source 1..20: mol_type = other DNA
aatttcaggctttttctaca

SEQ ID NO: 38162 - DNA, 20 bp, synthetic construct
  source 1..20: mol_type = other DNA
caatttcaggctttttctac

SEQ ID NO: 38163 - DNA, 20 bp, synthetic construct
  source 1..20: mol_type = other DNA
ctgcactgatcaccgaagtt

SEQ ID NO: 38164 - DNA, 20 bp, synthetic construct
  source 1..20: mol_type = other DNA
tctgcactgatcaccgaagt

SEQ ID NO: 38165 - DNA, 20 bp, synthetic construct
  source 1..20: mol_type = other DNA
atctgcactgatcaccgaag

SEQ ID NO: 38166 - DNA, 20 bp, synthetic construct
  source 1..20: mol_type = other DNA
catctgcactgatcaccgaa

SEQ ID NO: 38167 - DNA, 20 bp, synthetic construct
  source 1..20: mol_type = other DNA
acatctgcactgatcaccga

SEQ ID NO: 38168 - DNA, 20 bp, synthetic construct
  source 1..20: mol_type = other DNA
cacatctgcactgatcaccg

SEQ ID NO: 38169 - DNA, 20 bp, synthetic construct
  source 1..20: mol_type = other DNA
acacatctgcactgatcacc

SEQ ID NO: 38170 - DNA, 20 bp, synthetic construct
  source 1..20: mol_type = other DNA
aacacatctgcactgatcac

SEQ ID NO: 38171 - DNA, 20 bp, synthetic construct
  source 1..20: mol_type = other DNA
aaacacatctgcactgatca

SEQ ID NO: 38172 - DNA, 20 bp, synthetic construct
  source 1..20: mol_type = other DNA
gaaacacatctgcactgatc

SEQ ID NO: 38173 - DNA, 20 bp, synthetic construct
  source 1..20: mol_type = other DNA
tgaaacacatctgcactgat

SEQ ID NO: 38174 - DNA, 20 bp, synthetic construct
  source 1..20: mol_type = other DNA
ctgaaacacatctgcactga

SEQ ID NO: 38175 - DNA, 20 bp, synthetic construct
  source 1..20: mol_type = other DNA
tctgaaacacatctgcactg

SEQ ID NO: 38176 - DNA, 20 bp, synthetic construct
  source 1..20: mol_type = other DNA
ttctgaaacacatctgcact

SEQ ID NO: 38177 - DNA, 20 bp, synthetic construct
  source 1..20: mol_type = other DNA
gttctgaaacacatctgcac

SEQ ID NO: 38178 - DNA, 20 bp, synthetic construct
  source 1..20: mol_type = other DNA
agttctgaaacacatctgca

SEQ ID NO: 38179 - DNA, 20 bp, synthetic construct
  source 1..20: mol_type = other DNA
gagttctgaaacacatctgc

SEQ ID NO: 38180 - DNA, 20 bp, synthetic construct
  source 1..20: mol_type = other DNA
ggagttctgaaacacatctg

SEQ ID NO: 38181 - DNA, 20 bp, synthetic construct
  source 1..20: mol_type = other DNA
tggagttctgaaacacatct

SEQ ID NO: 38182 - DNA, 20 bp, synthetic construct
  source 1..20: mol_type = other DNA
atggagttctgaaacacatc

SEQ ID NO: 38183 - DNA, 20 bp, synthetic construct
  source 1..20: mol_type = other DNA
tatggagttctgaaacacat

SEQ ID NO: 38184 - DNA, 20 bp, synthetic construct
  source 1..20: mol_type = other DNA
ctatggagttctgaaacaca

SEQ ID NO: 38185 - DNA, 20 bp, synthetic construct
  source 1..20: mol_type = other DNA
actatggagttctgaaacac

SEQ ID NO: 38186 - DNA, 20 bp, synthetic construct
  source 1..20: mol_type = other DNA
tactatggagttctgaaaca

SEQ ID NO: 38187 - DNA, 20 bp, synthetic construct
  source 1..20: mol_type = other DNA
ctactatggagttctgaaac

SEQ ID NO: 38188 - DNA, 20 bp, synthetic construct
  source 1..20: mol_type = other DNA
tctactatggagttctgaaa

SEQ ID NO: 38189 - DNA, 20 bp, synthetic construct
  source 1..20: mol_type = other DNA
gtctactatggagttctgaa

SEQ ID NO: 38190 - DNA, 20 bp, synthetic construct
  source 1..20: mol_type = other DNA
agtctactatggagttctga

SEQ ID NO: 38191 - DNA, 20 bp, synthetic construct
  source 1..20: mol_type = other DNA
cagtctactatggagttctg

SEQ ID NO: 38192 - DNA, 20 bp, synthetic construct
  source 1..20: mol_type = other DNA
tcagtctactatggagttct

SEQ ID NO: 38193 - DNA, 20 bp, synthetic construct
  source 1..20: mol_type = other DNA
ttcagtctactatggagttc

SEQ ID NO: 38194 - DNA, 20 bp, synthetic construct
  source 1..20: mol_type = other DNA
gttcagtctactatggagtt

SEQ ID NO: 38195 - DNA, 20 bp, synthetic construct
  source 1..20: mol_type = other DNA
ggttcagtctactatggagt

SEQ ID NO: 38196 - DNA, 20 bp, synthetic construct
  source 1..20: mol_type = other DNA
aggttcagtctactatggag

SEQ ID NO: 38197 - DNA, 20 bp, synthetic construct
  source 1..20: mol_type = other DNA
taggttcagtctactatgga

SEQ ID NO: 38198 - DNA, 20 bp, synthetic construct
  source 1..20: mol_type = other DNA
ctaggttcagtctactatgg

SEQ ID NO: 38199 - DNA, 20 bp, synthetic construct
  source 1..20: mol_type = other DNA
tctaggttcagtctactatg

SEQ ID NO: 38200 - DNA, 20 bp, synthetic construct
  source 1..20: mol_type = other DNA
ctctaggttcagtctactat

SEQ ID NO: 38201 - DNA, 20 bp, synthetic construct
  source 1..20: mol_type = other DNA
tctctaggttcagtctacta

SEQ ID NO: 38202 - DNA, 20 bp, synthetic construct
  source 1..20: mol_type = other DNA
ttctctaggttcagtctact

SEQ ID NO: 38203 - DNA, 20 bp, synthetic construct
  source 1..20: mol_type = other DNA
attctctaggttcagtctac

SEQ ID NO: 38204 - DNA, 20 bp, synthetic construct
  source 1..20: mol_type = other DNA
cattctctaggttcagtcta

SEQ ID NO: 38205 - DNA, 20 bp, synthetic construct
  source 1..20: mol_type = other DNA
ccattctctaggttcagtct

SEQ ID NO: 38206 - DNA, 20 bp, synthetic construct
  source 1..20: mol_type = other DNA
accattctctaggttcagtc

SEQ ID NO: 38207 - DNA, 20 bp, synthetic construct
  source 1..20: mol_type = other DNA
aaccattctctaggttcagt

SEQ ID NO: 38208 - DNA, 20 bp, synthetic construct
  source 1..20: mol_type = other DNA
taaccattctctaggttcag

SEQ ID NO: 38209 - DNA, 20 bp, synthetic construct
  source 1..20: mol_type = other DNA
gtaaccattctctaggttca

SEQ ID NO: 38210 - DNA, 20 bp, synthetic construct
  source 1..20: mol_type = other DNA
tgtaaccattctctaggttc

SEQ ID NO: 38211 - DNA, 20 bp, synthetic construct
  source 1..20: mol_type = other DNA
atgtaaccattctctaggtt

SEQ ID NO: 38212 - DNA, 20 bp, synthetic construct
  source 1..20: mol_type = other DNA
gatgtaaccattctctaggt

SEQ ID NO: 38213 - DNA, 20 bp, synthetic construct
  source 1..20: mol_type = other DNA
tgatgtaaccattctctagg

SEQ ID NO: 38214 - DNA, 20 bp, synthetic construct
  source 1..20: mol_type = other DNA
gtgatgtaaccattctctag

SEQ ID NO: 38215 - DNA, 20 bp, synthetic construct
  source 1..20: mol_type = other DNA
agtgatgtaaccattctcta

SEQ ID NO: 38216 - DNA, 20 bp, synthetic construct
  source 1..20: mol_type = other DNA
aagtgatgtaaccattctct

SEQ ID NO: 38217 - DNA, 20 bp, synthetic construct
  source 1..20: mol_type = other DNA
taagtgatgtaaccattctc

SEQ ID NO: 38218 - DNA, 20 bp, synthetic construct
  source 1..20: mol_type = other DNA
ctaagtgatgtaaccattct

SEQ ID NO: 38219 - DNA, 20 bp, synthetic construct
  source 1..20: mol_type = other DNA
cctaagtgatgtaaccattc

SEQ ID NO: 38220 - DNA, 20 bp, synthetic construct
  source 1..20: mol_type = other DNA
acctaagtgatgtaaccatt

SEQ ID NO: 38221 - DNA, 20 bp, synthetic construct
  source 1..20: mol_type = other DNA
cacctaagtgatgtaaccat

SEQ ID NO: 38222 - DNA, 20 bp, synthetic construct
  source 1..20: mol_type = other DNA
tcacctaagtgatgtaacca

SEQ ID NO: 38223 - DNA, 20 bp, synthetic construct
  source 1..20: mol_type = other DNA
atcacctaagtgatgtaacc

SEQ ID NO: 38224 - DNA, 20 bp, synthetic construct
  source 1..20: mol_type = other DNA
gatcacctaagtgatgtaac

SEQ ID NO: 38225 - DNA, 20 bp, synthetic construct
  source 1..20: mol_type = other DNA
tgatcacctaagtgatgtaa

SEQ ID NO: 38226 - DNA, 20 bp, synthetic construct
  source 1..20: mol_type = other DNA
ctgatcacctaagtgatgta

SEQ ID NO: 38227 - DNA, 20 bp, synthetic construct
  source 1..20: mol_type = other DNA
actgatcacctaagtgatgt

SEQ ID NO: 38228 - DNA, 20 bp, synthetic construct
  source 1..20: mol_type = other DNA
cactgatcacctaagtgatg

SEQ ID NO: 38229 - DNA, 20 bp, synthetic construct
  source 1..20: mol_type = other DNA
acactgatcacctaagtgat

SEQ ID NO: 38230 - DNA, 20 bp, synthetic construct
  source 1..20: mol_type = other DNA
tacactgatcacctaagtga

SEQ ID NO: 38231 - DNA, 20 bp, synthetic construct
  source 1..20: mol_type = other DNA
ctacactgatcacctaagtg

SEQ ID NO: 38232 - DNA, 20 bp, synthetic construct
  source 1..20: mol_type = other DNA
tctacactgatcacctaagt

SEQ ID NO: 38233 - DNA, 20 bp, synthetic construct
  source 1..20: mol_type = other DNA
ctctacactgatcacctaag

SEQ ID NO: 38234 - DNA, 20 bp, synthetic construct
  source 1..20: mol_type = other DNA
tctctacactgatcacctaa

SEQ ID NO: 38235 - DNA, 20 bp, synthetic construct
  source 1..20: mol_type = other DNA
atctctacactgatcaccta

SEQ ID NO: 38236 - DNA, 20 bp, synthetic construct
  source 1..20: mol_type = other DNA
tatctctacactgatcacct

SEQ ID NO: 38237 - DNA, 20 bp, synthetic construct
  source 1..20: mol_type = other DNA
atatctctacactgatcacc

SEQ ID NO: 38238 - DNA, 20 bp, synthetic construct
  source 1..20: mol_type = other DNA
catatctctacactgatcac

SEQ ID NO: 38239 - DNA, 20 bp, synthetic construct
  source 1..20: mol_type = other DNA
acatatctctacactgatca

SEQ ID NO: 38240 - DNA, 20 bp, synthetic construct
  source 1..20: mol_type = other DNA
aacatatctctacactgatc

SEQ ID NO: 38241 - DNA, 20 bp, synthetic construct
  source 1..20: mol_type = other DNA
ctgtctacacgagaatttta

SEQ ID NO: 38242 - DNA, 20 bp, synthetic construct
  source 1..20: mol_type = other DNA
tctgtctacacgagaatttt

SEQ ID NO: 38243 - DNA, 20 bp, synthetic construct
  source 1..20: mol_type = other DNA
ctctgtctacacgagaattt

SEQ ID NO: 38244 - DNA, 20 bp, synthetic construct
  source 1..20: mol_type = other DNA
gctctgtctacacgagaatt

SEQ ID NO: 38245 - DNA, 20 bp, synthetic construct
  source 1..20: mol_type = other DNA
ggctctgtctacacgagaat

SEQ ID NO: 38246 - DNA, 20 bp, synthetic construct
  source 1..20: mol_type = other DNA
aggctctgtctacacgagaa

SEQ ID NO: 38247 - DNA, 20 bp, synthetic construct
  source 1..20: mol_type = other DNA
taggctctgtctacacgaga

SEQ ID NO: 38248 - DNA, 20 bp, synthetic construct
  source 1..20: mol_type = other DNA
ctaggctctgtctacacgag

SEQ ID NO: 38249 - DNA, 20 bp, synthetic construct
  source 1..20: mol_type = other DNA
tctaggctctgtctacacga

SEQ ID NO: 38250 - DNA, 20 bp, synthetic construct
  source 1..20: mol_type = other DNA
gtctaggctctgtctacacg

SEQ ID NO: 38251 - DNA, 20 bp, synthetic construct
  source 1..20: mol_type = other DNA
tgtctaggctctgtctacac

SEQ ID NO: 38252 - DNA, 20 bp, synthetic construct
  source 1..20: mol_type = other DNA
ttgtctaggctctgtctaca

SEQ ID NO: 38253 - DNA, 20 bp, synthetic construct
  source 1..20: mol_type = other DNA
attgtctaggctctgtctac

SEQ ID NO: 38254 - DNA, 20 bp, synthetic construct
  source 1..20: mol_type = other DNA
aattgtctaggctctgtcta

SEQ ID NO: 38255 - DNA, 20 bp, synthetic construct
  source 1..20: mol_type = other DNA
caattgtctaggctctgtct

SEQ ID NO: 38256 - DNA, 20 bp, synthetic construct
  source 1..20: mol_type = other DNA
acaattgtctaggctctgtc

SEQ ID NO: 38257 - DNA, 20 bp, synthetic construct
  source 1..20: mol_type = other DNA
aacaattgtctaggctctgt

SEQ ID NO: 38258 - DNA, 20 bp, synthetic construct
  source 1..20: mol_type = other DNA
taacaattgtctaggctctg

SEQ ID NO: 38259 - DNA, 20 bp, synthetic construct
  source 1..20: mol_type = other DNA
gtaacaattgtctaggctct

SEQ ID NO: 38260 - DNA, 20 bp, synthetic construct
  source 1..20: mol_type = other DNA
tgtaacaattgtctaggctc

SEQ ID NO: 38261 - DNA, 20 bp, synthetic construct
  source 1..20: mol_type = other DNA
atgtaacaattgtctaggct

SEQ ID NO: 38262 - DNA, 20 bp, synthetic construct
  source 1..20: mol_type = other DNA
gatgtaacaattgtctaggc

SEQ ID NO: 38263 - DNA, 20 bp, synthetic construct
  source 1..20: mol_type = other DNA
ggtgatgtaacaattgtcta

SEQ ID NO: 38264 - DNA, 20 bp, synthetic construct
  source 1..20: mol_type = other DNA
aggtgatgtaacaattgtct

SEQ ID NO: 38265 - DNA, 20 bp, synthetic construct
  source 1..20: mol_type = other DNA
taggtgatgtaacaattgtc

SEQ ID NO: 38266 - DNA, 20 bp, synthetic construct
  source 1..20: mol_type = other DNA
ctaggtgatgtaacaattgt

SEQ ID NO: 38267 - DNA, 20 bp, synthetic construct
  source 1..20: mol_type = other DNA
cactaggtgatgtaacaatt

SEQ ID NO: 38268 - DNA, 20 bp, synthetic construct
  source 1..20: mol_type = other DNA
tcactaggtgatgtaacaat

SEQ ID NO: 38269 - DNA, 20 bp, synthetic construct
  source 1..20: mol_type = other DNA
atcactaggtgatgtaacaa

SEQ ID NO: 38270 - DNA, 20 bp, synthetic construct
  source 1..20: mol_type = other DNA
gatcactaggtgatgtaaca

SEQ ID NO: 38271 - DNA, 20 bp, synthetic construct
  source 1..20: mol_type = other DNA
tgatcactaggtgatgtaac

SEQ ID NO: 38272 - DNA, 20 bp, synthetic construct
  source 1..20: mol_type = other DNA
ctgatcactaggtgatgtaa

SEQ ID NO: 38273 - DNA, 20 bp, synthetic construct
  source 1..20: mol_type = other DNA
actgatcactaggtgatgta

SEQ ID NO: 38274 - DNA, 20 bp, synthetic construct
  source 1..20: mol_type = other DNA
cactgatcactaggtgatgt

SEQ ID NO: 38275 - DNA, 20 bp, synthetic construct
  source 1..20: mol_type = other DNA
gcactgatcactaggtgatg

SEQ ID NO: 38276 - DNA, 20 bp, synthetic construct
  source 1..20: mol_type = other DNA
tgcactgatcactaggtgat

SEQ ID NO: 38277 - DNA, 20 bp, synthetic construct
  source 1..20: mol_type = other DNA
ctgcactgatcactaggtga

SEQ ID NO: 38278 - DNA, 20 bp, synthetic construct
  source 1..20: mol_type = other DNA
cctgcactgatcactaggtg

SEQ ID NO: 38279 - DNA, 20 bp, synthetic construct
  source 1..20: mol_type = other DNA
ccctgcactgatcactaggt

SEQ ID NO: 38280 - DNA, 20 bp, synthetic construct
  source 1..20: mol_type = other DNA
tccctgcactgatcactagg

SEQ ID NO: 38281 - DNA, 20 bp, synthetic construct
  source 1..20: mol_type = other DNA
atccctgcactgatcactag

SEQ ID NO: 38282 - DNA, 20 bp, synthetic construct
  source 1..20: mol_type = other DNA
tatccctgcactgatcacta

SEQ ID NO: 38283 - DNA, 20 bp, synthetic construct
  source 1..20: mol_type = other DNA
ttatccctgcactgatcact

SEQ ID NO: 38284 - DNA, 20 bp, synthetic construct
  source 1..20: mol_type = other DNA
cttatccctgcactgatcac

SEQ ID NO: 38285 - DNA, 20 bp, synthetic construct
  source 1..20: mol_type = other DNA
acttatccctgcactgatca

SEQ ID NO: 38286 - DNA, 20 bp, synthetic construct
  source 1..20: mol_type = other DNA
gacttatccctgcactgatc

SEQ ID NO: 38287 - DNA, 20 bp, synthetic construct
  source 1..20: mol_type = other DNA
tgacttatccctgcactgat

SEQ ID NO: 38288 - DNA, 20 bp, synthetic construct
  source 1..20: mol_type = other DNA
atgacttatccctgcactga

SEQ ID NO: 38289 - DNA, 20 bp, synthetic construct
  source 1..20: mol_type = other DNA
tatgacttatccctgcactg

SEQ ID NO: 38290 - DNA, 20 bp, synthetic construct
  source 1..20: mol_type = other DNA
ttatgacttatccctgcact

SEQ ID NO: 38291 - DNA, 20 bp, synthetic construct
  source 1..20: mol_type = other DNA
tttatgacttatccctgcac

SEQ ID NO: 38292 - DNA, 20 bp, synthetic construct
  source 1..20: mol_type = other DNA
ctttatgacttatccctgca

SEQ ID NO: 38293 - DNA, 20 bp, synthetic construct
  source 1..20: mol_type = other DNA
gctttatgacttatccctgc

SEQ ID NO: 38294 - DNA, 20 bp, synthetic construct
  source 1..20: mol_type = other DNA
ggctttatgacttatccctg

SEQ ID NO: 38295 - DNA, 20 bp, synthetic construct
  source 1..20: mol_type = other DNA
aggctttatgacttatccct

SEQ ID NO: 38296 - DNA, 20 bp, synthetic construct
  source 1..20: mol_type = other DNA
gaggctttatgacttatccc

SEQ ID NO: 38297 - DNA, 20 bp, synthetic construct
  source 1..20: mol_type = other DNA
ggaggctttatgacttatcc

SEQ ID NO: 38298 - DNA, 20 bp, synthetic construct
  source 1..20: mol_type = other DNA
aggaggctttatgacttatc

SEQ ID NO: 38299 - DNA, 20 bp, synthetic construct
  source 1..20: mol_type = other DNA
caggaggctttatgacttat

SEQ ID NO: 38300 - DNA, 20 bp, synthetic construct
  source 1..20: mol_type = other DNA
acaggaggctttatgactta

SEQ ID NO: 38301 - DNA, 20 bp, synthetic construct
  source 1..20: mol_type = other DNA
tacaggaggctttatgactt

SEQ ID NO: 38302 - DNA, 20 bp, synthetic construct
  source 1..20: mol_type = other DNA
ctacaggaggctttatgact

SEQ ID NO: 38303 - DNA, 20 bp, synthetic construct
  source 1..20: mol_type = other DNA
cctacaggaggctttatgac

SEQ ID NO: 38304 - DNA, 20 bp, synthetic construct
  source 1..20: mol_type = other DNA
gcctacaggaggctttatga

SEQ ID NO: 38305 - DNA, 20 bp, synthetic construct
  source 1..20: mol_type = other DNA
tgcctacaggaggctttatg

SEQ ID NO: 38306 - DNA, 20 bp, synthetic construct
  source 1..20: mol_type = other DNA
ctgcctacaggaggctttat

SEQ ID NO: 38307 - DNA, 20 bp, synthetic construct
  source 1..20: mol_type = other DNA
tctgcctacaggaggcttta

SEQ ID NO: 38308 - DNA, 20 bp, synthetic construct
  source 1..20: mol_type = other DNA
ctctgcctacaggaggcttt

SEQ ID NO: 38309 - DNA, 20 bp, synthetic construct
  source 1..20: mol_type = other DNA
actctgcctacaggaggctt

SEQ ID NO: 38310 - DNA, 20 bp, synthetic construct
  source 1..20: mol_type = other DNA
acactctgcctacaggaggc

SEQ ID NO: 38311 - DNA, 20 bp, synthetic construct
  source 1..20: mol_type = other DNA
tacactctgcctacaggagg

SEQ ID NO: 38312 - DNA, 20 bp, synthetic construct
  source 1..20: mol_type = other DNA
ctacactctgcctacaggag

SEQ ID NO: 38313 - DNA, 20 bp, synthetic construct
  source 1..20: mol_type = other DNA
cctacactctgcctacagga

SEQ ID NO: 38314 - DNA, 20 bp, synthetic construct
  source 1..20: mol_type = other DNA
gcctacactctgcctacagg

SEQ ID NO: 38315 - DNA, 20 bp, synthetic construct
  source 1..20: mol_type = other DNA
tgcctacactctgcctacag

SEQ ID NO: 38316 - DNA, 20 bp, synthetic construct
  source 1..20: mol_type = other DNA
ttgcctacactctgcctaca

SEQ ID NO: 38317 - DNA, 20 bp, synthetic construct
  source 1..20: mol_type = other DNA
cttgcctacactctgcctac

SEQ ID NO: 38318 - DNA, 20 bp, synthetic construct
  source 1..20: mol_type = other DNA
acttgcctacactctgccta

SEQ ID NO: 38319 - DNA, 20 bp, synthetic construct
  source 1..20: mol_type = other DNA
cacttgcctacactctgcct

SEQ ID NO: 38320 - DNA, 20 bp, synthetic construct
  source 1..20: mol_type = other DNA
acacttgcctacactctgcc

SEQ ID NO: 38321 - DNA, 20 bp, synthetic construct
  source 1..20: mol_type = other DNA
aacacttgcctacactctgc

SEQ ID NO: 38322 - DNA, 20 bp, synthetic construct
  source 1..20: mol_type = other DNA
gaacacttgcctacactctg

SEQ ID NO: 38323 - DNA, 20 bp, synthetic construct
  source 1..20: mol_type = other DNA
ggaacacttgcctacactct

SEQ ID NO: 38324 - DNA, 20 bp, synthetic construct
  source 1..20: mol_type = other DNA
gggaacacttgcctacactc

SEQ ID NO: 38325 - DNA, 20 bp, synthetic construct
  source 1..20: mol_type = other DNA
agggaacacttgcctacact

SEQ ID NO: 38326 - DNA, 20 bp, synthetic construct
  source 1..20: mol_type = other DNA
gagggaacacttgcctacac

SEQ ID NO: 38327 - DNA, 20 bp, synthetic construct
  source 1..20: mol_type = other DNA
ggagggaacacttgcctaca

SEQ ID NO: 38328 - DNA, 20 bp, synthetic construct
  source 1..20: mol_type = other DNA
gggagggaacacttgcctac

SEQ ID NO: 38329 - DNA, 20 bp, synthetic construct
  source 1..20: mol_type = other DNA
agggagggaacacttgccta

SEQ ID NO: 38330 - DNA, 20 bp, synthetic construct
  source 1..20: mol_type = other DNA
cagggagggaacacttgcct

SEQ ID NO: 38331 - DNA, 20 bp, synthetic construct
  source 1..20: mol_type = other DNA
ccagggagggaacacttgcc

SEQ ID NO: 38332 - DNA, 20 bp, synthetic construct
  source 1..20: mol_type = other DNA
cccagggagggaacacttgc

SEQ ID NO: 38333 - DNA, 20 bp, synthetic construct
  source 1..20: mol_type = other DNA
gcccagggagggaacacttg

SEQ ID NO: 38334 - DNA, 20 bp, synthetic construct
  source 1..20: mol_type = other DNA
agcccagggagggaacactt

SEQ ID NO: 38335 - DNA, 20 bp, synthetic construct
  source 1..20: mol_type = other DNA
cagcccagggagggaacact

SEQ ID NO: 38336 - DNA, 20 bp, synthetic construct
  source 1..20: mol_type = other DNA
tcagcccagggagggaacac

SEQ ID NO: 38337 - DNA, 20 bp, synthetic construct
  source 1..20: mol_type = other DNA
atcagcccagggagggaaca

SEQ ID NO: 38338 - DNA, 20 bp, synthetic construct
  source 1..20: mol_type = other DNA
gatcagcccagggagggaac

SEQ ID NO: 38339 - DNA, 20 bp, synthetic construct
  source 1..20: mol_type = other DNA
tgatcagcccagggagggaa

SEQ ID NO: 38340 - DNA, 20 bp, synthetic construct
  source 1..20: mol_type = other DNA
cactgatcagcccagggagg

SEQ ID NO: 38341 - DNA, 20 bp, synthetic construct
  source 1..20: mol_type = other DNA
ctctgcactgatcagcccag

SEQ ID NO: 38342 - DNA, 20 bp, synthetic construct
  source 1..20: mol_type = other DNA
atctctgcactgatcagccc

SEQ ID NO: 38343 - DNA, 20 bp, synthetic construct
  source 1..20: mol_type = other DNA
tatctctgcactgatcagcc

SEQ ID NO: 38344 - DNA, 20 bp, synthetic construct
  source 1..20: mol_type = other DNA
atatctctgcactgatcagc

SEQ ID NO: 38345 - DNA, 20 bp, synthetic construct
  source 1..20: mol_type = other DNA
gatatctctgcactgatcag

SEQ ID NO: 38346 - DNA, 20 bp, synthetic construct
  source 1..20: mol_type = other DNA
agatatctctgcactgatca

SEQ ID NO: 38347 - DNA, 20 bp, synthetic construct
  source 1..20: mol_type = other DNA
gagatatctctgcactgatc

SEQ ID NO: 38348 - DNA, 20 bp, synthetic construct
  source 1..20: mol_type = other DNA
tgagatatctctgcactgat

SEQ ID NO: 38349 - DNA, 20 bp, synthetic construct
  source 1..20: mol_type = other DNA
gtgagatatctctgcactga

SEQ ID NO: 38350 - DNA, 20 bp, synthetic construct
  source 1..20: mol_type = other DNA
tgtgagatatctctgcactg

SEQ ID NO: 38351 - DNA, 20 bp, synthetic construct
  source 1..20: mol_type = other DNA
ttgtgagatatctctgcact

SEQ ID NO: 38352 - DNA, 20 bp, synthetic construct
  source 1..20: mol_type = other DNA
tttgtgagatatctctgcac

SEQ ID NO: 38353 - DNA, 20 bp, synthetic construct
  source 1..20: mol_type = other DNA
ctttgtgagatatctctgca

SEQ ID NO: 38354 - DNA, 20 bp, synthetic construct
  source 1..20: mol_type = other DNA
gctttgtgagatatctctgc

SEQ ID NO: 38355 - DNA, 20 bp, synthetic construct
  source 1..20: mol_type = other DNA
ggctttgtgagatatctctg

SEQ ID NO: 38356 - DNA, 20 bp, synthetic construct
  source 1..20: mol_type = other DNA
gggctttgtgagatatctct

SEQ ID NO: 38357 - DNA, 20 bp, synthetic construct
  source 1..20: mol_type = other DNA
ggggctttgtgagatatctc

SEQ ID NO: 38358 - DNA, 20 bp, synthetic construct
  source 1..20: mol_type = other DNA
aggggctttgtgagatatct

SEQ ID NO: 38359 - DNA, 20 bp, synthetic construct
  source 1..20: mol_type = other DNA
taggggctttgtgagatatc

SEQ ID NO: 38360 - DNA, 20 bp, synthetic construct
  source 1..20: mol_type = other DNA
ataggggctttgtgagatat

SEQ ID NO: 38361 - DNA, 20 bp, synthetic construct
  source 1..20: mol_type = other DNA
tataggggctttgtgagata

SEQ ID NO: 38362 - DNA, 20 bp, synthetic construct
  source 1..20: mol_type = other DNA
ttataggggctttgtgagat

SEQ ID NO: 38363 - DNA, 20 bp, synthetic construct
  source 1..20: mol_type = other DNA
cttataggggctttgtgaga

SEQ ID NO: 38364 - DNA, 20 bp, synthetic construct
  source 1..20: mol_type = other DNA
gcttataggggctttgtgag

SEQ ID NO: 38365 - DNA, 20 bp, synthetic construct
  source 1..20: mol_type = other DNA
ggcttataggggctttgtga

SEQ ID NO: 38366 - DNA, 20 bp, synthetic construct
  source 1..20: mol_type = other DNA
tggcttataggggctttgtg

SEQ ID NO: 38367 - DNA, 20 bp, synthetic construct
  source 1..20: mol_type = other DNA
ttggcttataggggctttgt

SEQ ID NO: 38368 - DNA, 20 bp, synthetic construct
  source 1..20: mol_type = other DNA
tttggcttataggggctttg

SEQ ID NO: 38369 - DNA, 20 bp, synthetic construct
  source 1..20: mol_type = other DNA
gtttggcttataggggcttt

SEQ ID NO: 38370 - DNA, 20 bp, synthetic construct
  source 1..20: mol_type = other DNA
ggtttggcttataggggctt

SEQ ID NO: 38371 - DNA, 20 bp, synthetic construct
  source 1..20: mol_type = other DNA
aggtttggcttataggggct

SEQ ID NO: 38372 - DNA, 20 bp, synthetic construct
  source 1..20: mol_type = other DNA
aaggtttggcttataggggc

SEQ ID NO: 38373 - DNA, 20 bp, synthetic construct
  source 1..20: mol_type = other DNA
caaggtttggcttatagggg

SEQ ID NO: 38374 - DNA, 20 bp, synthetic construct
  source 1..20: mol_type = other DNA
tcaaggtttggcttataggg

SEQ ID NO: 38375 - DNA, 20 bp, synthetic construct
  source 1..20: mol_type = other DNA
gtcaaggtttggcttatagg

SEQ ID NO: 38376 - DNA, 20 bp, synthetic construct
  source 1..20: mol_type = other DNA
tgtcaaggtttggcttatag

SEQ ID NO: 38377 - DNA, 20 bp, synthetic construct
  source 1..20: mol_type = other DNA
ttgtcaaggtttggcttata

SEQ ID NO: 38378 - DNA, 20 bp, synthetic construct
  source 1..20: mol_type = other DNA
cttgtcaaggtttggcttat

SEQ ID NO: 38379 - DNA, 20 bp, synthetic construct
  source 1..20: mol_type = other DNA
ccttgtcaaggtttggctta

SEQ ID NO: 38380 - DNA, 20 bp, synthetic construct
  source 1..20: mol_type = other DNA
cccttgtcaaggtttggctt

SEQ ID NO: 38381 - DNA, 20 bp, synthetic construct
  source 1..20: mol_type = other DNA
acccttgtcaaggtttggct

SEQ ID NO: 38382 - DNA, 20 bp, synthetic construct
  source 1..20: mol_type = other DNA
aacccttgtcaaggtttggc

SEQ ID NO: 38383 - DNA, 20 bp, synthetic construct
  source 1..20: mol_type = other DNA
taacccttgtcaaggtttgg

SEQ ID NO: 38384 - DNA, 20 bp, synthetic construct
  source 1..20: mol_type = other DNA
gtaacccttgtcaaggtttg

SEQ ID NO: 38385 - DNA, 20 bp, synthetic construct
  source 1..20: mol_type = other DNA
tgtaacccttgtcaaggttt

SEQ ID NO: 38386 - DNA, 20 bp, synthetic construct
  source 1..20: mol_type = other DNA
atgtaacccttgtcaaggtt

SEQ ID NO: 38387 - DNA, 20 bp, synthetic construct
  source 1..20: mol_type = other DNA
gatgtaacccttgtcaaggt

SEQ ID NO: 38388 - DNA, 20 bp, synthetic construct
  source 1..20: mol_type = other DNA
tgatgtaacccttgtcaagg

SEQ ID NO: 38389 - DNA, 20 bp, synthetic construct
  source 1..20: mol_type = other DNA
gtgatgtaacccttgtcaag

SEQ ID NO: 38390 - DNA, 20 bp, synthetic construct
  source 1..20: mol_type = other DNA
ggtgatgtaacccttgtcaa

SEQ ID NO: 38391 - DNA, 20 bp, synthetic construct
  source 1..20: mol_type = other DNA
aggtgatgtaacccttgtca

SEQ ID NO: 38392 - DNA, 20 bp, synthetic construct
  source 1..20: mol_type = other DNA
caggtgatgtaacccttgtc

SEQ ID NO: 38393 - DNA, 20 bp, synthetic construct
  source 1..20: mol_type = other DNA
acaggtgatgtaacccttgt

SEQ ID NO: 38394 - DNA, 20 bp, synthetic construct
  source 1..20: mol_type = other DNA
aacaggtgatgtaacccttg

SEQ ID NO: 38395 - DNA, 20 bp, synthetic construct
  source 1..20: mol_type = other DNA
aaacaggtgatgtaaccctt

SEQ ID NO: 38396 - DNA, 20 bp, synthetic construct
  source 1..20: mol_type = other DNA
caaacaggtgatgtaaccct

SEQ ID NO: 38397 - DNA, 20 bp, synthetic construct
  source 1..20: mol_type = other DNA
tcaaacaggtgatgtaaccc

SEQ ID NO: 38398 - DNA, 20 bp, synthetic construct
  source 1..20: mol_type = other DNA
ctcaaacaggtgatgtaacc

SEQ ID NO: 38399 - DNA, 20 bp, synthetic construct
  source 1..20: mol_type = other DNA
gctcaaacaggtgatgtaac

SEQ ID NO: 38400 - DNA, 20 bp, synthetic construct
  source 1..20: mol_type = other DNA
tgctcaaacaggtgatgtaa

SEQ ID NO: 38401 - DNA, 20 bp, synthetic construct
  source 1..20: mol_type = other DNA
ctgctcaaacaggtgatgta

SEQ ID NO: 38402 - DNA, 20 bp, synthetic construct
  source 1..20: mol_type = other DNA
actgctcaaacaggtgatgt

SEQ ID NO: 38403 - DNA, 20 bp, synthetic construct
  source 1..20: mol_type = other DNA
cactgctcaaacaggtgatg

SEQ ID NO: 38404 - DNA, 20 bp, synthetic construct
  source 1..20: mol_type = other DNA
ccactgctcaaacaggtgat

SEQ ID NO: 38405 - DNA, 20 bp, synthetic construct
  source 1..20: mol_type = other DNA
tccactgctcaaacaggtga

SEQ ID NO: 38406 - DNA, 20 bp, synthetic construct
  source 1..20: mol_type = other DNA
ttccactgctcaaacaggtg

SEQ ID NO: 38407 - DNA, 20 bp, synthetic construct
  source 1..20: mol_type = other DNA
tttccactgctcaaacaggt

SEQ ID NO: 38408 - DNA, 20 bp, synthetic construct
  source 1..20: mol_type = other DNA
atttccactgctcaaacagg

SEQ ID NO: 38409 - DNA, 20 bp, synthetic construct
  source 1..20: mol_type = other DNA
tatttccactgctcaaacag

SEQ ID NO: 38410 - DNA, 20 bp, synthetic construct
  source 1..20: mol_type = other DNA
atatttccactgctcaaaca

SEQ ID NO: 38411 - DNA, 20 bp, synthetic construct
  source 1..20: mol_type = other DNA
tatatttccactgctcaaac

SEQ ID NO: 38412 - DNA, 20 bp, synthetic construct
  source 1..20: mol_type = other DNA
atatatttccactgctcaaa

SEQ ID NO: 38413 - DNA, 20 bp, synthetic construct
  source 1..20: mol_type = other DNA
tatatatttccactgctcaa

SEQ ID NO: 38414 - DNA, 20 bp, synthetic construct
  source 1..20: mol_type = other DNA
atatatatttccactgctca

SEQ ID NO: 38415 - DNA, 20 bp, synthetic construct
  source 1..20: mol_type = other DNA
gatatatatttccactgctc

SEQ ID NO: 38416 - DNA, 20 bp, synthetic construct
  source 1..20: mol_type = other DNA
tgatatatatttccactgct

SEQ ID NO: 38417 - DNA, 20 bp, synthetic construct
  source 1..20: mol_type = other DNA
gtgatatatatttccactgc

SEQ ID NO: 38418 - DNA, 20 bp, synthetic construct
  source 1..20: mol_type = other DNA
tgtgatatatatttccactg

SEQ ID NO: 38419 - DNA, 20 bp, synthetic construct
  source 1..20: mol_type = other DNA
ttgtgatatatatttccact

SEQ ID NO: 38420 - DNA, 20 bp, synthetic construct
  source 1..20: mol_type = other DNA
ctttgtgatatatatttcca

SEQ ID NO: 38421 - DNA, 20 bp, synthetic construct
  source 1..20: mol_type = other DNA
gctttgtgatatatatttcc

SEQ ID NO: 38422 - DNA, 20 bp, synthetic construct
  source 1..20: mol_type = other DNA
ggctttgtgatatatatttc

SEQ ID NO: 38423 - DNA, 20 bp, synthetic construct
  source 1..20: mol_type = other DNA
gggctttgtgatatatattt

SEQ ID NO: 38424 - DNA, 20 bp, synthetic construct
  source 1..20: mol_type = other DNA
ggggctttgtgatatatatt

SEQ ID NO: 38425 - DNA, 20 bp, synthetic construct
  source 1..20: mol_type = other DNA
gggggctttgtgatatatat

SEQ ID NO: 38426 - DNA, 20 bp, synthetic construct
  source 1..20: mol_type = other DNA
agggggctttgtgatatata

SEQ ID NO: 38427 - DNA, 20 bp, synthetic construct
  source 1..20: mol_type = other DNA
cagggggctttgtgatatat

SEQ ID NO: 38428 - DNA, 20 bp, synthetic construct
  source 1..20: mol_type = other DNA
acagggggctttgtgatata

SEQ ID NO: 38429 - DNA, 20 bp, synthetic construct
  source 1..20: mol_type = other DNA
tacagggggctttgtgatat

SEQ ID NO: 38430 - DNA, 20 bp, synthetic construct
  source 1..20: mol_type = other DNA
ctacagggggctttgtgata

SEQ ID NO: 38431 - DNA, 20 bp, synthetic construct
  source 1..20: mol_type = other DNA
tctacagggggctttgtgat

SEQ ID NO: 38432 - DNA, 20 bp, synthetic construct
  source 1..20: mol_type = other DNA
gtctacagggggctttgtga

SEQ ID NO: 38433 - DNA, 20 bp, synthetic construct
  source 1..20: mol_type = other DNA
tgtctacagggggctttgtg

SEQ ID NO: 38434 - DNA, 20 bp, synthetic construct
  source 1..20: mol_type = other DNA
ttgtctacagggggctttgt

SEQ ID NO: 38435 - DNA, 20 bp, synthetic construct
  source 1..20: mol_type = other DNA
tttgtctacagggggctttg

SEQ ID NO: 38436 - DNA, 20 bp, synthetic construct
  source 1..20: mol_type = other DNA
ctttgtctacagggggcttt

SEQ ID NO: 38437 - DNA, 20 bp, synthetic construct
  source 1..20: mol_type = other DNA
tgggctttgtctacaggggg

SEQ ID NO: 38438 - DNA, 20 bp, synthetic construct
  source 1..20: mol_type = other DNA
ctgggctttgtctacagggg

SEQ ID NO: 38439 - DNA, 20 bp, synthetic construct
  source 1..20: mol_type = other DNA
tctgggctttgtctacaggg

SEQ ID NO: 38440 - DNA, 20 bp, synthetic construct
  source 1..20: mol_type = other DNA
gtctgggctttgtctacagg

SEQ ID NO: 38441 - DNA, 20 bp, synthetic construct
  source 1..20: mol_type = other DNA
tgtctgggctttgtctacag

SEQ ID NO: 38442 - DNA, 20 bp, synthetic construct
  source 1..20: mol_type = other DNA
ttgtctgggctttgtctaca

SEQ ID NO: 38443 - DNA, 20 bp, synthetic construct
  source 1..20: mol_type = other DNA
attgtctgggctttgtctac

SEQ ID NO: 38444 - DNA, 20 bp, synthetic construct
  source 1..20: mol_type = other DNA
aattgtctgggctttgtcta

SEQ ID NO: 38445 - DNA, 20 bp, synthetic construct
  source 1..20: mol_type = other DNA
aaattgtctgggctttgtct

SEQ ID NO: 38446 - DNA, 20 bp, synthetic construct
  source 1..20: mol_type = other DNA
aaaattgtctgggctttgtc

SEQ ID NO: 38447 - DNA, 20 bp, synthetic construct
  source 1..20: mol_type = other DNA
aaaaattgtctgggctttgt

SEQ ID NO: 38448 - DNA, 20 bp, synthetic construct
  source 1..20: mol_type = other DNA
gtaaaaattgtctgggcttt

SEQ ID NO: 38449 - DNA, 20 bp, synthetic construct
  source 1..20: mol_type = other DNA
tgtaaaaattgtctgggctt

SEQ ID NO: 38450 - DNA, 20 bp, synthetic construct
  source 1..20: mol_type = other DNA
atgtaaaaattgtctgggct

SEQ ID NO: 38451 - DNA, 20 bp, synthetic construct
  source 1..20: mol_type = other DNA
gatgtaaaaattgtctgggc

SEQ ID NO: 38452 - DNA, 20 bp, synthetic construct
  source 1..20: mol_type = other DNA
ctcactcaggagatgtaaaa

SEQ ID NO: 38453 - DNA, 20 bp, synthetic construct
  source 1..20: mol_type = other DNA
gctcactcaggagatgtaaa

SEQ ID NO: 38454 - DNA, 20 bp, synthetic construct
  source 1..20: mol_type = other DNA
tgctcactcaggagatgtaa

SEQ ID NO: 38455 - DNA, 20 bp, synthetic construct
  source 1..20: mol_type = other DNA
atgctcactcaggagatgta

SEQ ID NO: 38456 - DNA, 20 bp, synthetic construct
  source 1..20: mol_type = other DNA
aatgctcactcaggagatgt

SEQ ID NO: 38457 - DNA, 20 bp, synthetic construct
  source 1..20: mol_type = other DNA
caatgctcactcaggagatg

SEQ ID NO: 38458 - DNA, 20 bp, synthetic construct
  source 1..20: mol_type = other DNA
ccaatgctcactcaggagat

SEQ ID NO: 38459 - DNA, 20 bp, synthetic construct
  source 1..20: mol_type = other DNA
tccaatgctcactcaggaga

SEQ ID NO: 38460 - DNA, 20 bp, synthetic construct
  source 1..20: mol_type = other DNA
ctccaatgctcactcaggag

SEQ ID NO: 38461 - DNA, 20 bp, synthetic construct
  source 1..20: mol_type = other DNA
tctccaatgctcactcagga

SEQ ID NO: 38462 - DNA, 20 bp, synthetic construct
  source 1..20: mol_type = other DNA
ctctccaatgctcactcagg

SEQ ID NO: 38463 - DNA, 20 bp, synthetic construct
  source 1..20: mol_type = other DNA
tctctccaatgctcactcag

SEQ ID NO: 38464 - DNA, 20 bp, synthetic construct
  source 1..20: mol_type = other DNA
atctctccaatgctcactca

SEQ ID NO: 38465 - DNA, 20 bp, synthetic construct
  source 1..20: mol_type = other DNA
gatctctccaatgctcactc

SEQ ID NO: 38466 - DNA, 20 bp, synthetic construct
  source 1..20: mol_type = other DNA
agatctctccaatgctcact

SEQ ID NO: 38467 - DNA, 20 bp, synthetic construct
  source 1..20: mol_type = other DNA
cagatctctccaatgctcac

SEQ ID NO: 38468 - DNA, 20 bp, synthetic construct
  source 1..20: mol_type = other DNA
acagatctctccaatgctca

SEQ ID NO: 38469 - DNA, 20 bp, synthetic construct
  source 1..20: mol_type = other DNA
gacagatctctccaatgctc

SEQ ID NO: 38470 - DNA, 20 bp, synthetic construct
  source 1..20: mol_type = other DNA
tgacagatctctccaatgct

SEQ ID NO: 38471 - DNA, 20 bp, synthetic construct
  source 1..20: mol_type = other DNA
gtgacagatctctccaatgc

SEQ ID NO: 38472 - DNA, 20 bp, synthetic construct
  source 1..20: mol_type = other DNA
tgtgacagatctctccaatg

SEQ ID NO: 38473 - DNA, 20 bp, synthetic construct
  source 1..20: mol_type = other DNA
ttgtgacagatctctccaat

SEQ ID NO: 38474 - DNA, 20 bp, synthetic construct
  source 1..20: mol_type = other DNA
attgtgacagatctctccaa

SEQ ID NO: 38475 - DNA, 20 bp, synthetic construct
  source 1..20: mol_type = other DNA
cattgtgacagatctctcca

SEQ ID NO: 38476 - DNA, 20 bp, synthetic construct
  source 1..20: mol_type = other DNA
gcattgtgacagatctctcc

SEQ ID NO: 38477 - DNA, 20 bp, synthetic construct
  source 1..20: mol_type = other DNA
ggcattgtgacagatctctc

SEQ ID NO: 38478 - DNA, 20 bp, synthetic construct
  source 1..20: mol_type = other DNA
gggcattgtgacagatctct

SEQ ID NO: 38479 - DNA, 20 bp, synthetic construct
  source 1..20: mol_type = other DNA
ggggcattgtgacagatctc

SEQ ID NO: 38480 - DNA, 20 bp, synthetic construct
  source 1..20: mol_type = other DNA
aggggcattgtgacagatct

SEQ ID NO: 38481 - DNA, 20 bp, synthetic construct
  source 1..20: mol_type = other DNA
caggggcattgtgacagatc

SEQ ID NO: 38482 - DNA, 20 bp, synthetic construct
  source 1..20: mol_type = other DNA
acaggggcattgtgacagat

SEQ ID NO: 38483 - DNA, 20 bp, synthetic construct
  source 1..20: mol_type = other DNA
tacaggggcattgtgacaga

SEQ ID NO: 38484 - DNA, 20 bp, synthetic construct
  source 1..20: mol_type = other DNA
ctacaggggcattgtgacag

SEQ ID NO: 38485 - DNA, 20 bp, synthetic construct
  source 1..20: mol_type = other DNA
cctacaggggcattgtgaca

SEQ ID NO: 38486 - DNA, 20 bp, synthetic construct
  source 1..20: mol_type = other DNA
gcctacaggggcattgtgac

SEQ ID NO: 38487 - DNA, 20 bp, synthetic construct
  source 1..20: mol_type = other DNA
tgcctacaggggcattgtga

SEQ ID NO: 38488 - DNA, 20 bp, synthetic construct
  source 1..20: mol_type = other DNA
ctgcctacaggggcattgtg

SEQ ID NO: 38489 - DNA, 20 bp, synthetic construct
  source 1..20: mol_type = other DNA
ctctgcctacaggggcattg

SEQ ID NO: 38490 - DNA, 20 bp, synthetic construct
  source 1..20: mol_type = other DNA
taagctctgcctacaggggc

SEQ ID NO: 38491 - DNA, 20 bp, synthetic construct
  source 1..20: mol_type = other DNA
ctaagctctgcctacagggg

SEQ ID NO: 38492 - DNA, 20 bp, synthetic construct
  source 1..20: mol_type = other DNA
tctaagctctgcctacaggg

SEQ ID NO: 38493 - DNA, 20 bp, synthetic construct
  source 1..20: mol_type = other DNA
gtctaagctctgcctacagg

SEQ ID NO: 38494 - DNA, 20 bp, synthetic construct
  source 1..20: mol_type = other DNA
tgtctaagctctgcctacag

SEQ ID NO: 38495 - DNA, 20 bp, synthetic construct
  source 1..20: mol_type = other DNA
ttgtctaagctctgcctaca

SEQ ID NO: 38496 - DNA, 20 bp, synthetic construct
  source 1..20: mol_type = other DNA
cttgtctaagctctgcctac

SEQ ID NO: 38497 - DNA, 20 bp, synthetic construct
  source 1..20: mol_type = other DNA
acttgtctaagctctgccta

SEQ ID NO: 38498 - DNA, 20 bp, synthetic construct
  source 1..20: mol_type = other DNA
cacttgtctaagctctgcct

SEQ ID NO: 38499 - DNA, 20 bp, synthetic construct
  source 1..20: mol_type = other DNA
acacttgtctaagctctgcc

SEQ ID NO: 38500 - DNA, 20 bp, synthetic construct
  source 1..20: mol_type = other DNA
aacacttgtctaagctctgc

SEQ ID NO: 38501 - DNA, 20 bp, synthetic construct
  source 1..20: mol_type = other DNA
taacacttgtctaagctctg

SEQ ID NO: 38502 - DNA, 20 bp, synthetic construct
  source 1..20: mol_type = other DNA
gtaacacttgtctaagctct

SEQ ID NO: 38503 - DNA, 20 bp, synthetic construct
  source 1..20: mol_type = other DNA
tgtaacacttgtctaagctc

SEQ ID NO: 38504 - DNA, 20 bp, synthetic construct
  source 1..20: mol_type = other DNA
atgtaacacttgtctaagct

SEQ ID NO: 38505 - DNA, 20 bp, synthetic construct
  source 1..20: mol_type = other DNA
gatgtaacacttgtctaagc

SEQ ID NO: 38506 - DNA, 20 bp, synthetic construct
  source 1..20: mol_type = other DNA
gtgatgtaacacttgtctaa

SEQ ID NO: 38507 - DNA, 20 bp, synthetic construct
  source 1..20: mol_type = other DNA
ggtgatgtaacacttgtcta

SEQ ID NO: 38508 - DNA, 20 bp, synthetic construct
  source 1..20: mol_type = other DNA
aggtgatgtaacacttgtct

SEQ ID NO: 38509 - DNA, 20 bp, synthetic construct
  source 1..20: mol_type = other DNA
caggtgatgtaacacttgtc

SEQ ID NO: 38510 - DNA, 20 bp, synthetic construct
  source 1..20: mol_type = other DNA
ccaggtgatgtaacacttgt

SEQ ID NO: 38511 - DNA, 20 bp, synthetic construct
  source 1..20: mol_type = other DNA
cccaggtgatgtaacacttg

SEQ ID NO: 38512 - DNA, 20 bp, synthetic construct
  source 1..20: mol_type = other DNA
acccaggtgatgtaacactt

SEQ ID NO: 38513 - DNA, 20 bp, synthetic construct
  source 1..20: mol_type = other DNA
cacccaggtgatgtaacact

SEQ ID NO: 38514 - DNA, 20 bp, synthetic construct
  source 1..20: mol_type = other DNA
tcacccaggtgatgtaacac

SEQ ID NO: 38515 - DNA, 20 bp, synthetic construct
  source 1..20: mol_type = other DNA
atcacccaggtgatgtaaca

SEQ ID NO: 38516 - DNA, 20 bp, synthetic construct
  source 1..20: mol_type = other DNA
gatcacccaggtgatgtaac

SEQ ID NO: 38517 - DNA, 20 bp, synthetic construct
  source 1..20: mol_type = other DNA
tgatcacccaggtgatgtaa

SEQ ID NO: 38518 - DNA, 20 bp, synthetic construct
  source 1..20: mol_type = other DNA
ctgatcacccaggtgatgta

SEQ ID NO: 38519 - DNA, 20 bp, synthetic construct
  source 1..20: mol_type = other DNA
actgatcacccaggtgatgt

SEQ ID NO: 38520 - DNA, 20 bp, synthetic construct
  source 1..20: mol_type = other DNA
cactgatcacccaggtgatg

SEQ ID NO: 38521 - DNA, 20 bp, synthetic construct
  source 1..20: mol_type = other DNA
gcactgatcacccaggtgat

SEQ ID NO: 38522 - DNA, 20 bp, synthetic construct
  source 1..20: mol_type = other DNA
tgcactgatcacccaggtga

SEQ ID NO: 38523 - DNA, 20 bp, synthetic construct
  source 1..20: mol_type = other DNA
ctgcactgatcacccaggtg

SEQ ID NO: 38524 - DNA, 20 bp, synthetic construct
  source 1..20: mol_type = other DNA
tctgcactgatcacccaggt

SEQ ID NO: 38525 - DNA, 20 bp, synthetic construct
  source 1..20: mol_type = other DNA
ctctgcactgatcacccagg

SEQ ID NO: 38526 - DNA, 20 bp, synthetic construct
  source 1..20: mol_type = other DNA
tctctgcactgatcacccag

SEQ ID NO: 38527 - DNA, 20 bp, synthetic construct
  source 1..20: mol_type = other DNA
atctctgcactgatcaccca

SEQ ID NO: 38528 - DNA, 20 bp, synthetic construct
  source 1..20: mol_type = other DNA
catctctgcactgatcaccc

SEQ ID NO: 38529 - DNA, 20 bp, synthetic construct
  source 1..20: mol_type = other DNA
acatctctgcactgatcacc

SEQ ID NO: 38530 - DNA, 20 bp, synthetic construct
  source 1..20: mol_type = other DNA
cacatctctgcactgatcac

SEQ ID NO: 38531 - DNA, 20 bp, synthetic construct
  source 1..20: mol_type = other DNA
acacatctctgcactgatca

SEQ ID NO: 38532 - DNA, 20 bp, synthetic construct
  source 1..20: mol_type = other DNA
gacacatctctgcactgatc

SEQ ID NO: 38533 - DNA, 20 bp, synthetic construct
  source 1..20: mol_type = other DNA
tgacacatctctgcactgat

SEQ ID NO: 38534 - DNA, 20 bp, synthetic construct
  source 1..20: mol_type = other DNA
actacaggagcgttttgaca

SEQ ID NO: 38535 - DNA, 20 bp, synthetic construct
  source 1..20: mol_type = other DNA
gactacaggagcgttttgac

SEQ ID NO: 38536 - DNA, 20 bp, synthetic construct
  source 1..20: mol_type = other DNA
agactacaggagcgttttga

SEQ ID NO: 38537 - DNA, 20 bp, synthetic construct
  source 1..20: mol_type = other DNA
cagactacaggagcgttttg

SEQ ID NO: 38538 - DNA, 20 bp, synthetic construct
  source 1..20: mol_type = other DNA
tcagactacaggagcgtttt

SEQ ID NO: 38539 - DNA, 20 bp, synthetic construct
  source 1..20: mol_type = other DNA
ttcagactacaggagcgttt

SEQ ID NO: 38540 - DNA, 20 bp, synthetic construct
  source 1..20: mol_type = other DNA
gttcagactacaggagcgtt

SEQ ID NO: 38541 - DNA, 20 bp, synthetic construct
  source 1..20: mol_type = other DNA
ggttcagactacaggagcgt

SEQ ID NO: 38542 - DNA, 20 bp, synthetic construct
  source 1..20: mol_type = other DNA
aggttcagactacaggagcg

SEQ ID NO: 38543 - DNA, 20 bp, synthetic construct
  source 1..20: mol_type = other DNA
taggttcagactacaggagc

SEQ ID NO: 38544 - DNA, 20 bp, synthetic construct
  source 1..20: mol_type = other DNA
ctaggttcagactacaggag

SEQ ID NO: 38545 - DNA, 20 bp, synthetic construct
  source 1..20: mol_type = other DNA
tctaggttcagactacagga

SEQ ID NO: 38546 - DNA, 20 bp, synthetic construct
  source 1..20: mol_type = other DNA
gtctaggttcagactacagg

SEQ ID NO: 38547 - DNA, 20 bp, synthetic construct
  source 1..20: mol_type = other DNA
tgtctaggttcagactacag

SEQ ID NO: 38548 - DNA, 20 bp, synthetic construct
  source 1..20: mol_type = other DNA
ctgtctaggttcagactaca

SEQ ID NO: 38549 - DNA, 20 bp, synthetic construct
  source 1..20: mol_type = other DNA
cctgtctaggttcagactac

SEQ ID NO: 38550 - DNA, 20 bp, synthetic construct
  source 1..20: mol_type = other DNA
tcctgtctaggttcagacta

SEQ ID NO: 38551 - DNA, 20 bp, synthetic construct
  source 1..20: mol_type = other DNA
ctcctgtctaggttcagact

SEQ ID NO: 38552 - DNA, 20 bp, synthetic construct
  source 1..20: mol_type = other DNA
actcctgtctaggttcagac

SEQ ID NO: 38553 - DNA, 20 bp, synthetic construct
  source 1..20: mol_type = other DNA
aactcctgtctaggttcaga

SEQ ID NO: 38554 - DNA, 20 bp, synthetic construct
  source 1..20: mol_type = other DNA
taactcctgtctaggttcag

SEQ ID NO: 38555 - DNA, 20 bp, synthetic construct
  source 1..20: mol_type = other DNA
gtaactcctgtctaggttca

SEQ ID NO: 38556 - DNA, 20 bp, synthetic construct
  source 1..20: mol_type = other DNA
tgtaactcctgtctaggttc

SEQ ID NO: 38557 - DNA, 20 bp, synthetic construct
  source 1..20: mol_type = other DNA
atgtaactcctgtctaggtt

SEQ ID NO: 38558 - DNA, 20 bp, synthetic construct
  source 1..20: mol_type = other DNA
gatgtaactcctgtctaggt

SEQ ID NO: 38559 - DNA, 20 bp, synthetic construct
  source 1..20: mol_type = other DNA
tgatgtaactcctgtctagg

SEQ ID NO: 38560 - DNA, 20 bp, synthetic construct
  source 1..20: mol_type = other DNA
gtgatgtaactcctgtctag

SEQ ID NO: 38561 - DNA, 20 bp, synthetic construct
  source 1..20: mol_type = other DNA
ggtgatgtaactcctgtcta

SEQ ID NO: 38562 - DNA, 20 bp, synthetic construct
  source 1..20: mol_type = other DNA
aggtgatgtaactcctgtct

SEQ ID NO: 38563 - DNA, 20 bp, synthetic construct
  source 1..20: mol_type = other DNA
aaggtgatgtaactcctgtc

SEQ ID NO: 38564 - DNA, 20 bp, synthetic construct
  source 1..20: mol_type = other DNA
caaggtgatgtaactcctgt

SEQ ID NO: 38565 - DNA, 20 bp, synthetic construct
  source 1..20: mol_type = other DNA
ccaaggtgatgtaactcctg

SEQ ID NO: 38566 - DNA, 20 bp, synthetic construct
  source 1..20: mol_type = other DNA
cccaaggtgatgtaactcct

SEQ ID NO: 38567 - DNA, 20 bp, synthetic construct
  source 1..20: mol_type = other DNA
ccccaaggtgatgtaactcc

SEQ ID NO: 38568 - DNA, 20 bp, synthetic construct
  source 1..20: mol_type = other DNA
tccccaaggtgatgtaactc

SEQ ID NO: 38569 - DNA, 20 bp, synthetic construct
  source 1..20: mol_type = other DNA
atccccaaggtgatgtaact

SEQ ID NO: 38570 - DNA, 20 bp, synthetic construct
  source 1..20: mol_type = other DNA
gatccccaaggtgatgtaac

SEQ ID NO: 38571 - DNA, 20 bp, synthetic construct
  source 1..20: mol_type = other DNA
tgatccccaaggtgatgtaa

SEQ ID NO: 38572 - DNA, 20 bp, synthetic construct
  source 1..20: mol_type = other DNA
ctgatccccaaggtgatgta

SEQ ID NO: 38573 - DNA, 20 bp, synthetic construct
  source 1..20: mol_type = other DNA
actgatccccaaggtgatgt

SEQ ID NO: 38574 - DNA, 20 bp, synthetic construct
  source 1..20: mol_type = other DNA
cactgatccccaaggtgatg

SEQ ID NO: 38575 - DNA, 20 bp, synthetic construct
  source 1..20: mol_type = other DNA
gcactgatccccaaggtgat

SEQ ID NO: 38576 - DNA, 20 bp, synthetic construct
  source 1..20: mol_type = other DNA
tgcactgatccccaaggtga

SEQ ID NO: 38577 - DNA, 20 bp, synthetic construct
  source 1..20: mol_type = other DNA
ctgcactgatccccaaggtg

SEQ ID NO: 38578 - DNA, 20 bp, synthetic construct
  source 1..20: mol_type = other DNA
tctgcactgatccccaaggt

SEQ ID NO: 38579 - DNA, 20 bp, synthetic construct
  source 1..20: mol_type = other DNA
ctctgcactgatccccaagg

SEQ ID NO: 38580 - DNA, 20 bp, synthetic construct
  source 1..20: mol_type = other DNA
tctctgcactgatccccaag

SEQ ID NO: 38581 - DNA, 20 bp, synthetic construct
  source 1..20: mol_type = other DNA
atctctgcactgatccccaa

SEQ ID NO: 38582 - DNA, 20 bp, synthetic construct
  source 1..20: mol_type = other DNA
tatctctgcactgatcccca

SEQ ID NO: 38583 - DNA, 20 bp, synthetic construct
  source 1..20: mol_type = other DNA
cgtatctctgcactgatccc

SEQ ID NO: 38584 - DNA, 20 bp, synthetic construct
  source 1..20: mol_type = other DNA
acgtatctctgcactgatcc

SEQ ID NO: 38585 - DNA, 20 bp, synthetic construct
  source 1..20: mol_type = other DNA
cacgtatctctgcactgatc

SEQ ID NO: 38586 - DNA, 20 bp, synthetic construct
  source 1..20: mol_type = other DNA
tcacgtatctctgcactgat

SEQ ID NO: 38587 - DNA, 20 bp, synthetic construct
  source 1..20: mol_type = other DNA
ctcacgtatctctgcactga

SEQ ID NO: 38588 - DNA, 20 bp, synthetic construct
  source 1..20: mol_type = other DNA
tctcacgtatctctgcactg

SEQ ID NO: 38589 - DNA, 20 bp, synthetic construct
  source 1..20: mol_type = other DNA
ttctcacgtatctctgcact

SEQ ID NO: 38590 - DNA, 20 bp, synthetic construct
  source 1..20: mol_type = other DNA
attctcacgtatctctgcac

SEQ ID NO: 38591 - DNA, 20 bp, synthetic construct
  source 1..20: mol_type = other DNA
aattctcacgtatctctgca

SEQ ID NO: 38592 - DNA, 20 bp, synthetic construct
  source 1..20: mol_type = other DNA
gaattctcacgtatctctgc

SEQ ID NO: 38593 - DNA, 20 bp, synthetic construct
  source 1..20: mol_type = other DNA
ggaattctcacgtatctctg

SEQ ID NO: 38594 - DNA, 20 bp, synthetic construct
  source 1..20: mol_type = other DNA
gggaattctcacgtatctct

SEQ ID NO: 38595 - DNA, 20 bp, synthetic construct
  source 1..20: mol_type = other DNA
agggaattctcacgtatctc

SEQ ID NO: 38596 - DNA, 20 bp, synthetic construct
  source 1..20: mol_type = other DNA
aagggaattctcacgtatct

SEQ ID NO: 38597 - DNA, 20 bp, synthetic construct
  source 1..20: mol_type = other DNA
caagggaattctcacgtatc

SEQ ID NO: 38598 - DNA, 20 bp, synthetic construct
  source 1..20: mol_type = other DNA
acaagggaattctcacgtat

SEQ ID NO: 38599 - DNA, 20 bp, synthetic construct
  source 1..20: mol_type = other DNA
tacaagggaattctcacgta

SEQ ID NO: 38600 - DNA, 20 bp, synthetic construct
  source 1..20: mol_type = other DNA
ctacaagggaattctcacgt

SEQ ID NO: 38601 - DNA, 20 bp, synthetic construct
  source 1..20: mol_type = other DNA
cctacaagggaattctcacg

SEQ ID NO: 38602 - DNA, 20 bp, synthetic construct
  source 1..20: mol_type = other DNA
gcctacaagggaattctcac

SEQ ID NO: 38603 - DNA, 20 bp, synthetic construct
  source 1..20: mol_type = other DNA
tgcctacaagggaattctca

SEQ ID NO: 38604 - DNA, 20 bp, synthetic construct
  source 1..20: mol_type = other DNA
ctgcctacaagggaattctc

SEQ ID NO: 38605 - DNA, 20 bp, synthetic construct
  source 1..20: mol_type = other DNA
cctgcctacaagggaattct

SEQ ID NO: 38606 - DNA, 20 bp, synthetic construct
  source 1..20: mol_type = other DNA
ccctgcctacaagggaattc

SEQ ID NO: 38607 - DNA, 20 bp, synthetic construct
  source 1..20: mol_type = other DNA
gccctgcctacaagggaatt

SEQ ID NO: 38608 - DNA, 20 bp, synthetic construct
  source 1..20: mol_type = other DNA
ggccctgcctacaagggaat

SEQ ID NO: 38609 - DNA, 20 bp, synthetic construct
  source 1..20: mol_type = other DNA
aggccctgcctacaagggaa

SEQ ID NO: 38610 - DNA, 20 bp, synthetic construct
  source 1..20: mol_type = other DNA
tctaggccctgcctacaagg

SEQ ID NO: 38611 - DNA, 20 bp, synthetic construct
  source 1..20: mol_type = other DNA
aacacttgtctaggccctgc

SEQ ID NO: 38612 - DNA, 20 bp, synthetic construct
  source 1..20: mol_type = other DNA
taacacttgtctaggccctg

SEQ ID NO: 38613 - DNA, 20 bp, synthetic construct
  source 1..20: mol_type = other DNA
gtaacacttgtctaggccct

SEQ ID NO: 38614 - DNA, 20 bp, synthetic construct
  source 1..20: mol_type = other DNA
tgtaacacttgtctaggccc

SEQ ID NO: 38615 - DNA, 20 bp, synthetic construct
  source 1..20: mol_type = other DNA
atgtaacacttgtctaggcc

SEQ ID NO: 38616 - DNA, 20 bp, synthetic construct
  source 1..20: mol_type = other DNA
gatgtaacacttgtctaggc

SEQ ID NO: 38617 - DNA, 20 bp, synthetic construct
  source 1..20: mol_type = other DNA
tgatgtaacacttgtctagg

SEQ ID NO: 38618 - DNA, 20 bp, synthetic construct
  source 1..20: mol_type = other DNA
gtgatgtaacacttgtctag

SEQ ID NO: 38619 - DNA, 20 bp, synthetic construct
  source 1..20: mol_type = other DNA
taggtgatgtaacacttgtc

SEQ ID NO: 38620 - DNA, 20 bp, synthetic construct
  source 1..20: mol_type = other DNA
ctaggtgatgtaacacttgt

SEQ ID NO: 38621 - DNA, 20 bp, synthetic construct
  source 1..20: mol_type = other DNA
cctaggtgatgtaacacttg

SEQ ID NO: 38622 - DNA, 20 bp, synthetic construct
  source 1..20: mol_type = other DNA
acctaggtgatgtaacactt

SEQ ID NO: 38623 - DNA, 20 bp, synthetic construct
  source 1..20: mol_type = other DNA
aacctaggtgatgtaacact

SEQ ID NO: 38624 - DNA, 20 bp, synthetic construct
  source 1..20: mol_type = other DNA
taacctaggtgatgtaacac

SEQ ID NO: 38625 - DNA, 20 bp, synthetic construct
  source 1..20: mol_type = other DNA
ataacctaggtgatgtaaca

SEQ ID NO: 38626 - DNA, 20 bp, synthetic construct
  source 1..20: mol_type = other DNA
gataacctaggtgatgtaac

SEQ ID NO: 38627 - DNA, 20 bp, synthetic construct
  source 1..20: mol_type = other DNA
tgataacctaggtgatgtaa

SEQ ID NO: 38628 - DNA, 20 bp, synthetic construct
  source 1..20: mol_type = other DNA
ctgataacctaggtgatgta

SEQ ID NO: 38629 - DNA, 20 bp, synthetic construct
  source 1..20: mol_type = other DNA
actgataacctaggtgatgt

SEQ ID NO: 38630 - DNA, 20 bp, synthetic construct
  source 1..20: mol_type = other DNA
cactgataacctaggtgatg

SEQ ID NO: 38631 - DNA, 20 bp, synthetic construct
  source 1..20: mol_type = other DNA
gcactgataacctaggtgat

SEQ ID NO: 38632 - DNA, 20 bp, synthetic construct
  source 1..20: mol_type = other DNA
tgcactgataacctaggtga

SEQ ID NO: 38633 - DNA, 20 bp, synthetic construct
  source 1..20: mol_type = other DNA
ctgcactgataacctaggtg

SEQ ID NO: 38634 - DNA, 20 bp, synthetic construct
  source 1..20: mol_type = other DNA
tctgcactgataacctaggt

SEQ ID NO: 38635 - DNA, 20 bp, synthetic construct
  source 1..20: mol_type = other DNA
ctctgcactgataacctagg

SEQ ID NO: 38636 - DNA, 20 bp, synthetic construct
  source 1..20: mol_type = other DNA
tctctgcactgataacctag

SEQ ID NO: 38637 - DNA, 20 bp, synthetic construct
  source 1..20: mol_type = other DNA
atctctgcactgataaccta

SEQ ID NO: 38638 - DNA, 20 bp, synthetic construct
  source 1..20: mol_type = other DNA
tatctctgcactgataacct

SEQ ID NO: 38639 - DNA, 20 bp, synthetic construct
  source 1..20: mol_type = other DNA
atatctctgcactgataacc

SEQ ID NO: 38640 - DNA, 20 bp, synthetic construct
  source 1..20: mol_type = other DNA
catatctctgcactgataac

SEQ ID NO: 38641 - DNA, 20 bp, synthetic construct
  source 1..20: mol_type = other DNA
acatatctctgcactgataa

SEQ ID NO: 38642 - DNA, 20 bp, synthetic construct
  source 1..20: mol_type = other DNA
cacatatctctgcactgata

SEQ ID NO: 38643 - DNA, 20 bp, synthetic construct
  source 1..20: mol_type = other DNA
tcacatatctctgcactgat

SEQ ID NO: 38644 - DNA, 20 bp, synthetic construct
  source 1..20: mol_type = other DNA
ctcacatatctctgcactga

SEQ ID NO: 38645 - DNA, 20 bp, synthetic construct
  source 1..20: mol_type = other DNA
tctcacatatctctgcactg

SEQ ID NO: 38646 - DNA, 20 bp, synthetic construct
  source 1..20: mol_type = other DNA
ttctcacatatctctgcact

SEQ ID NO: 38647 - DNA, 20 bp, synthetic construct
  source 1..20: mol_type = other DNA
attctcacatatctctgcac

SEQ ID NO: 38648 - DNA, 20 bp, synthetic construct
  source 1..20: mol_type = other DNA
aattctcacatatctctgca

SEQ ID NO: 38649 - DNA, 20 bp, synthetic construct
  source 1..20: mol_type = other DNA
gaattctcacatatctctgc

SEQ ID NO: 38650 - DNA, 20 bp, synthetic construct
  source 1..20: mol_type = other DNA
ggaattctcacatatctctg

SEQ ID NO: 38651 - DNA, 20 bp, synthetic construct
  source 1..20: mol_type = other DNA
gggaattctcacatatctct

SEQ ID NO: 38652 - DNA, 20 bp, synthetic construct
  source 1..20: mol_type = other DNA
cgggaattctcacatatctc

SEQ ID NO: 38653 - DNA, 20 bp, synthetic construct
  source 1..20: mol_type = other DNA
acgggaattctcacatatct

SEQ ID NO: 38654 - DNA, 20 bp, synthetic construct
  source 1..20: mol_type = other DNA
cacgggaattctcacatatc

SEQ ID NO: 38655 - DNA, 20 bp, synthetic construct
  source 1..20: mol_type = other DNA
acacgggaattctcacatat

SEQ ID NO: 38656 - DNA, 20 bp, synthetic construct
  source 1..20: mol_type = other DNA
tacacgggaattctcacata

SEQ ID NO: 38657 - DNA, 20 bp, synthetic construct
  source 1..20: mol_type = other DNA
ctacacgggaattctcacat

SEQ ID NO: 38658 - DNA, 20 bp, synthetic construct
  source 1..20: mol_type = other DNA
cctacacgggaattctcaca

SEQ ID NO: 38659 - DNA, 20 bp, synthetic construct
  source 1..20: mol_type = other DNA
gcctacacgggaattctcac

SEQ ID NO: 38660 - DNA, 20 bp, synthetic construct
  source 1..20: mol_type = other DNA
tgcctacacgggaattctca

SEQ ID NO: 38661 - DNA, 20 bp, synthetic construct
  source 1..20: mol_type = other DNA
ctgcctacacgggaattctc

SEQ ID NO: 38662 - DNA, 20 bp, synthetic construct
  source 1..20: mol_type = other DNA
tctgcctacacgggaattct

SEQ ID NO: 38663 - DNA, 20 bp, synthetic construct
  source 1..20: mol_type = other DNA
ctctgcctacacgggaattc

SEQ ID NO: 38664 - DNA, 20 bp, synthetic construct
  source 1..20: mol_type = other DNA
gctctgcctacacgggaatt

SEQ ID NO: 38665 - DNA, 20 bp, synthetic construct
  source 1..20: mol_type = other DNA
ggctctgcctacacgggaat

SEQ ID NO: 38666 - DNA, 20 bp, synthetic construct
  source 1..20: mol_type = other DNA
aggctctgcctacacgggaa

SEQ ID NO: 38667 - DNA, 20 bp, synthetic construct
  source 1..20: mol_type = other DNA
taggctctgcctacacggga

SEQ ID NO: 38668 - DNA, 20 bp, synthetic construct
  source 1..20: mol_type = other DNA
ctaggctctgcctacacggg

SEQ ID NO: 38669 - DNA, 20 bp, synthetic construct
  source 1..20: mol_type = other DNA
tctaggctctgcctacacgg

SEQ ID NO: 38670 - DNA, 20 bp, synthetic construct
  source 1..20: mol_type = other DNA
gtctaggctctgcctacacg

SEQ ID NO: 38671 - DNA, 20 bp, synthetic construct
  source 1..20: mol_type = other DNA
tgtctaggctctgcctacac

SEQ ID NO: 38672 - DNA, 20 bp, synthetic construct
  source 1..20: mol_type = other DNA
ttgtctaggctctgcctaca

SEQ ID NO: 38673 - DNA, 20 bp, synthetic construct
  source 1..20: mol_type = other DNA
cttgtctaggctctgcctac

SEQ ID NO: 38674 - DNA, 20 bp, synthetic construct
  source 1..20: mol_type = other DNA
acttgtctaggctctgccta

SEQ ID NO: 38675 - DNA, 20 bp, synthetic construct
  source 1..20: mol_type = other DNA
aacacttgtctaggctctgc

SEQ ID NO: 38676 - DNA, 20 bp, synthetic construct
  source 1..20: mol_type = other DNA
taacacttgtctaggctctg

SEQ ID NO: 38677 - DNA, 20 bp, synthetic construct
  source 1..20: mol_type = other DNA
gtaacacttgtctaggctct

SEQ ID NO: 38678 - DNA, 20 bp, synthetic construct
  source 1..20: mol_type = other DNA
tgtaacacttgtctaggctc

SEQ ID NO: 38679 - DNA, 20 bp, synthetic construct
  source 1..20: mol_type = other DNA
atgtaacacttgtctaggct

SEQ ID NO: 38680 - DNA, 20 bp, synthetic construct
  source 1..20: mol_type = other DNA
actaggtgatgtaacacttg

SEQ ID NO: 38681 - DNA, 20 bp, synthetic construct
  source 1..20: mol_type = other DNA
aactaggtgatgtaacactt

SEQ ID NO: 38682 - DNA, 20 bp, synthetic construct
  source 1..20: mol_type = other DNA
actgataaactaggtgatgt

SEQ ID NO: 38683 - DNA, 20 bp, synthetic construct
  source 1..20: mol_type = other DNA
ggaggctttatgactaataa

SEQ ID NO: 38684 - DNA, 20 bp, synthetic construct
  source 1..20: mol_type = other DNA
aggaggctttatgactaata

SEQ ID NO: 38685 - DNA, 20 bp, synthetic construct
  source 1..20: mol_type = other DNA
caggaggctttatgactaat

SEQ ID NO: 38686 - DNA, 20 bp, synthetic construct
  source 1..20: mol_type = other DNA
acaggaggctttatgactaa

SEQ ID NO: 38687 - DNA, 20 bp, synthetic construct
  source 1..20: mol_type = other DNA
tacaggaggctttatgacta

SEQ ID NO: 38688 - DNA, 20 bp, synthetic construct
  source 1..20: mol_type = other DNA
ggagggaactcttgtctacg

SEQ ID NO: 38689 - DNA, 20 bp, synthetic construct
  source 1..20: mol_type = other DNA
aggagggaactcttgtctac

SEQ ID NO: 38690 - DNA, 20 bp, synthetic construct
  source 1..20: mol_type = other DNA
gaggagggaactcttgtcta

SEQ ID NO: 38691 - DNA, 20 bp, synthetic construct
  source 1..20: mol_type = other DNA
tgaggagggaactcttgtct

SEQ ID NO: 38692 - DNA, 20 bp, synthetic construct
  source 1..20: mol_type = other DNA
ctgaggagggaactcttgtc

SEQ ID NO: 38693 - DNA, 20 bp, synthetic construct
  source 1..20: mol_type = other DNA
cctgaggagggaactcttgt

SEQ ID NO: 38694 - DNA, 20 bp, synthetic construct
  source 1..20: mol_type = other DNA
ccctgaggagggaactcttg

SEQ ID NO: 38695 - DNA, 20 bp, synthetic construct
  source 1..20: mol_type = other DNA
accctgaggagggaactctt

SEQ ID NO: 38696 - DNA, 20 bp, synthetic construct
  source 1..20: mol_type = other DNA
caccctgaggagggaactct

SEQ ID NO: 38697 - DNA, 20 bp, synthetic construct
  source 1..20: mol_type = other DNA
tcaccctgaggagggaactc

SEQ ID NO: 38698 - DNA, 20 bp, synthetic construct
  source 1..20: mol_type = other DNA
atcaccctgaggagggaact

SEQ ID NO: 38699 - DNA, 20 bp, synthetic construct
  source 1..20: mol_type = other DNA
gatcaccctgaggagggaac

SEQ ID NO: 38700 - DNA, 20 bp, synthetic construct
  source 1..20: mol_type = other DNA
tgatcaccctgaggagggaa

SEQ ID NO: 38701 - DNA, 20 bp, synthetic construct
  source 1..20: mol_type = other DNA
ctgatcaccctgaggaggga

SEQ ID NO: 38702 - DNA, 20 bp, synthetic construct
  source 1..20: mol_type = other DNA
actgatcaccctgaggaggg

SEQ ID NO: 38703 - DNA, 20 bp, synthetic construct
  source 1..20: mol_type = other DNA
cactgatcaccctgaggagg

SEQ ID NO: 38704 - DNA, 20 bp, synthetic construct
  source 1..20: mol_type = other DNA
gcactgatcaccctgaggag

SEQ ID NO: 38705 - DNA, 20 bp, synthetic construct
  source 1..20: mol_type = other DNA
tgcactgatcaccctgagga

SEQ ID NO: 38706 - DNA, 20 bp, synthetic construct
  source 1..20: mol_type = other DNA
ctgcactgatcaccctgagg

SEQ ID NO: 38707 - DNA, 20 bp, synthetic construct
  source 1..20: mol_type = other DNA
tctgcactgatcaccctgag

SEQ ID NO: 38708 - DNA, 20 bp, synthetic construct
  source 1..20: mol_type = other DNA
ctctgcactgatcaccctga

SEQ ID NO: 38709 - DNA, 20 bp, synthetic construct
  source 1..20: mol_type = other DNA
tctctgcactgatcaccctg

SEQ ID NO: 38710 - DNA, 20 bp, synthetic construct
  source 1..20: mol_type = other DNA
atctctgcactgatcaccct

SEQ ID NO: 38711 - DNA, 20 bp, synthetic construct
  source 1..20: mol_type = other DNA
gtgacacatctctgcactga

SEQ ID NO: 38712 - DNA, 20 bp, synthetic construct
  source 1..20: mol_type = other DNA
tgtgacacatctctgcactg

SEQ ID NO: 38713 - DNA, 20 bp, synthetic construct
  source 1..20: mol_type = other DNA
ttgtgacacatctctgcact

SEQ ID NO: 38714 - DNA, 20 bp, synthetic construct
  source 1..20: mol_type = other DNA
tttgtgacacatctctgcac

SEQ ID NO: 38715 - DNA, 20 bp, synthetic construct
  source 1..20: mol_type = other DNA
ctttgtgacacatctctgca

SEQ ID NO: 38716 - DNA, 20 bp, synthetic construct
  source 1..20: mol_type = other DNA
gctttgtgacacatctctgc

SEQ ID NO: 38717 - DNA, 20 bp, synthetic construct
  source 1..20: mol_type = other DNA
ggctttgtgacacatctctg

SEQ ID NO: 38718 - DNA, 20 bp, synthetic construct
  source 1..20: mol_type = other DNA
gggctttgtgacacatctct

SEQ ID NO: 38719 - DNA, 20 bp, synthetic construct
  source 1..20: mol_type = other DNA
ggggctttgtgacacatctc

SEQ ID NO: 38720 - DNA, 20 bp, synthetic construct
  source 1..20: mol_type = other DNA
aggggctttgtgacacatct

SEQ ID NO: 38721 - DNA, 20 bp, synthetic construct
  source 1..20: mol_type = other DNA
caggggctttgtgacacatc

SEQ ID NO: 38722 - DNA, 20 bp, synthetic construct
  source 1..20: mol_type = other DNA
acaggggctttgtgacacat

SEQ ID NO: 38723 - DNA, 20 bp, synthetic construct
  source 1..20: mol_type = other DNA
tacaggggctttgtgacaca

SEQ ID NO: 38724 - DNA, 20 bp, synthetic construct
  source 1..20: mol_type = other DNA
ctacaggggctttgtgacac

SEQ ID NO: 38725 - DNA, 20 bp, synthetic construct
  source 1..20: mol_type = other DNA
cctacaggggctttgtgaca

SEQ ID NO: 38726 - DNA, 20 bp, synthetic construct
  source 1..20: mol_type = other DNA
tgcctacaggggctttgtga

SEQ ID NO: 38727 - DNA, 20 bp, synthetic construct
  source 1..20: mol_type = other DNA
ctgcctacaggggctttgtg

SEQ ID NO: 38728 - DNA, 20 bp, synthetic construct
  source 1..20: mol_type = other DNA
tgtctaggctctgcctacag

SEQ ID NO: 38729 - DNA, 20 bp, synthetic construct
  source 1..20: mol_type = other DNA
aactcttgtctaggctctgc

SEQ ID NO: 38730 - DNA, 20 bp, synthetic construct
  source 1..20: mol_type = other DNA
aaactcttgtctaggctctg

SEQ ID NO: 38731 - DNA, 20 bp, synthetic construct
  source 1..20: mol_type = other DNA
gaaactcttgtctaggctct

SEQ ID NO: 38732 - DNA, 20 bp, synthetic construct
  source 1..20: mol_type = other DNA
tgaaactcttgtctaggctc

SEQ ID NO: 38733 - DNA, 20 bp, synthetic construct
  source 1..20: mol_type = other DNA
atgaaactcttgtctaggct

SEQ ID NO: 38734 - DNA, 20 bp, synthetic construct
  source 1..20: mol_type = other DNA
gatgaaactcttgtctaggc

SEQ ID NO: 38735 - DNA, 20 bp, synthetic construct
  source 1..20: mol_type = other DNA
tgatgaaactcttgtctagg

SEQ ID NO: 38736 - DNA, 20 bp, synthetic construct
  source 1..20: mol_type = other DNA
gtgatgaaactcttgtctag

SEQ ID NO: 38737 - DNA, 20 bp, synthetic construct
  source 1..20: mol_type = other DNA
agtgatgaaactcttgtcta

SEQ ID NO: 38738 - DNA, 20 bp, synthetic construct
  source 1..20: mol_type = other DNA
aagtgatgaaactcttgtct

SEQ ID NO: 38739 - DNA, 20 bp, synthetic construct
  source 1..20: mol_type = other DNA
caagtgatgaaactcttgtc

SEQ ID NO: 38740 - DNA, 20 bp, synthetic construct
  source 1..20: mol_type = other DNA
ccaagtgatgaaactcttgt

SEQ ID NO: 38741 - DNA, 20 bp, synthetic construct
  source 1..20: mol_type = other DNA
accaagtgatgaaactcttg

SEQ ID NO: 38742 - DNA, 20 bp, synthetic construct
  source 1..20: mol_type = other DNA
caaccaagtgatgaaactct

SEQ ID NO: 38743 - DNA, 20 bp, synthetic construct
  source 1..20: mol_type = other DNA
ctgatcaaccaagtgatgaa

SEQ ID NO: 38744 - DNA, 20 bp, synthetic construct
  source 1..20: mol_type = other DNA
actgatcaaccaagtgatga

SEQ ID NO: 38745 - DNA, 20 bp, synthetic construct
  source 1..20: mol_type = other DNA
aactgatcaaccaagtgatg

SEQ ID NO: 38746 - DNA, 20 bp, synthetic construct
  source 1..20: mol_type = other DNA
gaactgatcaaccaagtgat

SEQ ID NO: 38747 - DNA, 20 bp, synthetic construct
  source 1..20: mol_type = other DNA
tgaactgatcaaccaagtga

SEQ ID NO: 38748 - DNA, 20 bp, synthetic construct
  source 1..20: mol_type = other DNA
ctgaactgatcaaccaagtg

SEQ ID NO: 38749 - DNA, 20 bp, synthetic construct
  source 1..20: mol_type = other DNA
tctgaactgatcaaccaagt

SEQ ID NO: 38750 - DNA, 20 bp, synthetic construct
  source 1..20: mol_type = other DNA
ctctgaactgatcaaccaag

SEQ ID NO: 38751 - DNA, 20 bp, synthetic construct
  source 1..20: mol_type = other DNA
tctctgaactgatcaaccaa

SEQ ID NO: 38752 - DNA, 20 bp, synthetic construct
  source 1..20: mol_type = other DNA
atctctgaactgatcaacca

SEQ ID NO: 38753 - DNA, 20 bp, synthetic construct
  source 1..20: mol_type = other DNA
catctctgaactgatcaacc

SEQ ID NO: 38754 - DNA, 20 bp, synthetic construct
  source 1..20: mol_type = other DNA
acatctctgaactgatcaac

SEQ ID NO: 38755 - DNA, 20 bp, synthetic construct
  source 1..20: mol_type = other DNA
cacatctctgaactgatcaa

SEQ ID NO: 38756 - DNA, 20 bp, synthetic construct
  source 1..20: mol_type = other DNA
acacatctctgaactgatca

SEQ ID NO: 38757 - DNA, 20 bp, synthetic construct
  source 1..20: mol_type = other DNA
gacacatctctgaactgatc

SEQ ID NO: 38758 - DNA, 20 bp, synthetic construct
  source 1..20: mol_type = other DNA
tgacacatctctgaactgat

SEQ ID NO: 38759 - DNA, 20 bp, synthetic construct
  source 1..20: mol_type = other DNA
ctgacacatctctgaactga

SEQ ID NO: 38760 - DNA, 20 bp, synthetic construct
  source 1..20: mol_type = other DNA
tctgacacatctctgaactg

SEQ ID NO: 38761 - DNA, 20 bp, synthetic construct
  source 1..20: mol_type = other DNA
ttctgacacatctctgaact

SEQ ID NO: 38762 - DNA, 20 bp, synthetic construct
  source 1..20: mol_type = other DNA
attctgacacatctctgaac

SEQ ID NO: 38763 - DNA, 20 bp, synthetic construct
  source 1..20: mol_type = other DNA
cattctgacacatctctgaa

SEQ ID NO: 38764 - DNA, 20 bp, synthetic construct
  source 1..20: mol_type = other DNA
gcattctgacacatctctga

SEQ ID NO: 38765 - DNA, 20 bp, synthetic construct
  source 1..20: mol_type = other DNA
ggcattctgacacatctctg

SEQ ID NO: 38766 - DNA, 20 bp, synthetic construct
  source 1..20: mol_type = other DNA
gggcattctgacacatctct

SEQ ID NO: 38767 - DNA, 20 bp, synthetic construct
  source 1..20: mol_type = other DNA
tgggcattctgacacatctc

SEQ ID NO: 38768 - DNA, 20 bp, synthetic construct
  source 1..20: mol_type = other DNA
atgggcattctgacacatct

SEQ ID NO: 38769 - DNA, 20 bp, synthetic construct
  source 1..20: mol_type = other DNA
catgggcattctgacacatc

SEQ ID NO: 38770 - DNA, 20 bp, synthetic construct
  source 1..20: mol_type = other DNA
acatgggcattctgacacat

SEQ ID NO: 38771 - DNA, 20 bp, synthetic construct
  source 1..20: mol_type = other DNA
tacatgggcattctgacaca

SEQ ID NO: 38772 - DNA, 20 bp, synthetic construct
  source 1..20: mol_type = other DNA
ctacatgggcattctgacac

SEQ ID NO: 38773 - DNA, 20 bp, synthetic construct
  source 1..20: mol_type = other DNA
cctacatgggcattctgaca

SEQ ID NO: 38774 - DNA, 20 bp, synthetic construct
  source 1..20: mol_type = other DNA
gcctacatgggcattctgac

SEQ ID NO: 38775 - DNA, 20 bp, synthetic construct
  source 1..20: mol_type = other DNA
tgcctacatgggcattctga

SEQ ID NO: 38776 - DNA, 20 bp, synthetic construct
  source 1..20: mol_type = other DNA
ctgcctacatgggcattctg

SEQ ID NO: 38777 - DNA, 20 bp, synthetic construct
  source 1..20: mol_type = other DNA
tctgcctacatgggcattct

SEQ ID NO: 38778 - DNA, 20 bp, synthetic construct
  source 1..20: mol_type = other DNA
atctgcctacatgggcattc

SEQ ID NO: 38779 - DNA, 20 bp, synthetic construct
  source 1..20: mol_type = other DNA
gatctgcctacatgggcatt

SEQ ID NO: 38780 - DNA, 20 bp, synthetic construct
  source 1..20: mol_type = other DNA
agatctgcctacatgggcat

SEQ ID NO: 38781 - DNA, 20 bp, synthetic construct
  source 1..20: mol_type = other DNA
tagatctgcctacatgggca

SEQ ID NO: 38782 - DNA, 20 bp, synthetic construct
  source 1..20: mol_type = other DNA
ttagatctgcctacatgggc

SEQ ID NO: 38783 - DNA, 20 bp, synthetic construct
  source 1..20: mol_type = other DNA
cttagatctgcctacatggg

SEQ ID NO: 38784 - DNA, 20 bp, synthetic construct
  source 1..20: mol_type = other DNA
tcttagatctgcctacatgg

SEQ ID NO: 38785 - DNA, 20 bp, synthetic construct
  source 1..20: mol_type = other DNA
gtcttagatctgcctacatg

SEQ ID NO: 38786 - DNA, 20 bp, synthetic construct
  source 1..20: mol_type = other DNA
tgtcttagatctgcctacat

SEQ ID NO: 38787 - DNA, 20 bp, synthetic construct
  source 1..20: mol_type = other DNA
ttgtcttagatctgcctaca

SEQ ID NO: 38788 - DNA, 20 bp, synthetic construct
  source 1..20: mol_type = other DNA
cttgtcttagatctgcctac

SEQ ID NO: 38789 - DNA, 20 bp, synthetic construct
  source 1..20: mol_type = other DNA
gcttgtcttagatctgccta

SEQ ID NO: 38790 - DNA, 20 bp, synthetic construct
  source 1..20: mol_type = other DNA
cgcttgtcttagatctgcct

SEQ ID NO: 38791 - DNA, 20 bp, synthetic construct
  source 1..20: mol_type = other DNA
acgcttgtcttagatctgcc

SEQ ID NO: 38792 - DNA, 20 bp, synthetic construct
  source 1..20: mol_type = other DNA
gacgcttgtcttagatctgc

SEQ ID NO: 38793 - DNA, 20 bp, synthetic construct
  source 1..20: mol_type = other DNA
ggacgcttgtcttagatctg

SEQ ID NO: 38794 - DNA, 20 bp, synthetic construct
  source 1..20: mol_type = other DNA
tggacgcttgtcttagatct

SEQ ID NO: 38795 - DNA, 20 bp, synthetic construct
  source 1..20: mol_type = other DNA
atggacgcttgtcttagatc

SEQ ID NO: 38796 - DNA, 20 bp, synthetic construct
  source 1..20: mol_type = other DNA
gatggacgcttgtcttagat

SEQ ID NO: 38797 - DNA, 20 bp, synthetic construct
  source 1..20: mol_type = other DNA
tgatggacgcttgtcttaga

SEQ ID NO: 38798 - DNA, 20 bp, synthetic construct
  source 1..20: mol_type = other DNA
gtgatggacgcttgtcttag

SEQ ID NO: 38799 - DNA, 20 bp, synthetic construct
  source 1..20: mol_type = other DNA
ggtgatggacgcttgtctta

SEQ ID NO: 38800 - DNA, 20 bp, synthetic construct
  source 1..20: mol_type = other DNA
aggtgatggacgcttgtctt

SEQ ID NO: 38801 - DNA, 20 bp, synthetic construct
  source 1..20: mol_type = other DNA
caggtgatggacgcttgtct

SEQ ID NO: 38802 - DNA, 20 bp, synthetic construct
  source 1..20: mol_type = other DNA
ccaggtgatggacgcttgtc

SEQ ID NO: 38803 - DNA, 20 bp, synthetic construct
  source 1..20: mol_type = other DNA
cccaggtgatggacgcttgt

SEQ ID NO: 38804 - DNA, 20 bp, synthetic construct
  source 1..20: mol_type = other DNA
acccaggtgatggacgcttg

SEQ ID NO: 38805 - DNA, 20 bp, synthetic construct
  source 1..20: mol_type = other DNA
cacccaggtgatggacgctt

SEQ ID NO: 38806 - DNA, 20 bp, synthetic construct
  source 1..20: mol_type = other DNA
tcacccaggtgatggacgct

SEQ ID NO: 38807 - DNA, 20 bp, synthetic construct
  source 1..20: mol_type = other DNA
atcacccaggtgatggacgc

SEQ ID NO: 38808 - DNA, 20 bp, synthetic construct
  source 1..20: mol_type = other DNA
gatcacccaggtgatggacg

SEQ ID NO: 38809 - DNA, 20 bp, synthetic construct
  source 1..20: mol_type = other DNA
tgatcacccaggtgatggac

SEQ ID NO: 38810 - DNA, 20 bp, synthetic construct
  source 1..20: mol_type = other DNA
ctgatcacccaggtgatgga

SEQ ID NO: 38811 - DNA, 20 bp, synthetic construct
  source 1..20: mol_type = other DNA
actgatcacccaggtgatgg

SEQ ID NO: 38812 - DNA, 20 bp, synthetic construct
  source 1..20: mol_type = other DNA
tatctctgcactgatcaccc

SEQ ID NO: 38813 - DNA, 20 bp, synthetic construct
  source 1..20: mol_type = other DNA
atatctctgcactgatcacc

SEQ ID NO: 38814 - DNA, 20 bp, synthetic construct
  source 1..20: mol_type = other DNA
catatctctgcactgatcac

SEQ ID NO: 38815 - DNA, 20 bp, synthetic construct
  source 1..20: mol_type = other DNA
acatatctctgcactgatca

SEQ ID NO: 38816 - DNA, 20 bp, synthetic construct
  source 1..20: mol_type = other DNA
tacatatctctgcactgatc

SEQ ID NO: 38817 - DNA, 20 bp, synthetic construct
  source 1..20: mol_type = other DNA
gtacatatctctgcactgat

SEQ ID NO: 38818 - DNA, 20 bp, synthetic construct
  source 1..20: mol_type = other DNA
ggtacatatctctgcactga

SEQ ID NO: 38819 - DNA, 20 bp, synthetic construct
  source 1..20: mol_type = other DNA
tggtacatatctctgcactg

SEQ ID NO: 38820 - DNA, 20 bp, synthetic construct
  source 1..20: mol_type = other DNA
ctggtacatatctctgcact

SEQ ID NO: 38821 - DNA, 20 bp, synthetic construct
  source 1..20: mol_type = other DNA
actggtacatatctctgcac

SEQ ID NO: 38822 - DNA, 20 bp, synthetic construct
  source 1..20: mol_type = other DNA
cactggtacatatctctgca

SEQ ID NO: 38823 - DNA, 20 bp, synthetic construct
  source 1..20: mol_type = other DNA
acactggtacatatctctgc

SEQ ID NO: 38824 - DNA, 20 bp, synthetic construct
  source 1..20: mol_type = other DNA
gacactggtacatatctctg

SEQ ID NO: 38825 - DNA, 20 bp, synthetic construct
  source 1..20: mol_type = other DNA
ggacactggtacatatctct

SEQ ID NO: 38826 - DNA, 20 bp, synthetic construct
  source 1..20: mol_type = other DNA
gggacactggtacatatctc

SEQ ID NO: 38827 - DNA, 20 bp, synthetic construct
  source 1..20: mol_type = other DNA
ggggacactggtacatatct

SEQ ID NO: 38828 - DNA, 20 bp, synthetic construct
  source 1..20: mol_type = other DNA
aggggacactggtacatatc

SEQ ID NO: 38829 - DNA, 20 bp, synthetic construct
  source 1..20: mol_type = other DNA
caggggacactggtacatat

SEQ ID NO: 38830 - DNA, 20 bp, synthetic construct
  source 1..20: mol_type = other DNA
acaggggacactggtacata

SEQ ID NO: 38831 - DNA, 20 bp, synthetic construct
  source 1..20: mol_type = other DNA
tacaggggacactggtacat

SEQ ID NO: 38832 - DNA, 20 bp, synthetic construct
  source 1..20: mol_type = other DNA
ctacaggggacactggtaca

SEQ ID NO: 38833 - DNA, 20 bp, synthetic construct
  source 1..20: mol_type = other DNA
cctacaggggacactggtac

SEQ ID NO: 38834 - DNA, 20 bp, synthetic construct
  source 1..20: mol_type = other DNA
gcctacaggggacactggta

SEQ ID NO: 38835 - DNA, 20 bp, synthetic construct
  source 1..20: mol_type = other DNA
tgcctacaggggacactggt

SEQ ID NO: 38836 - DNA, 20 bp, synthetic construct
  source 1..20: mol_type = other DNA
ctgcctacaggggacactgg

SEQ ID NO: 38837 - DNA, 20 bp, synthetic construct
  source 1..20: mol_type = other DNA
actgcctacaggggacactg

SEQ ID NO: 38838 - DNA, 20 bp, synthetic construct
  source 1..20: mol_type = other DNA
cactgcctacaggggacact

SEQ ID NO: 38839 - DNA, 20 bp, synthetic construct
  source 1..20: mol_type = other DNA
gcactgcctacaggggacac

SEQ ID NO: 38840 - DNA, 20 bp, synthetic construct
  source 1..20: mol_type = other DNA
taggcactgcctacagggga

SEQ ID NO: 38841 - DNA, 20 bp, synthetic construct
  source 1..20: mol_type = other DNA
tctaggcactgcctacaggg

SEQ ID NO: 38842 - DNA, 20 bp, synthetic construct
  source 1..20: mol_type = other DNA
tgtctaggcactgcctacag

SEQ ID NO: 38843 - DNA, 20 bp, synthetic construct
  source 1..20: mol_type = other DNA
ttgtctaggcactgcctaca

SEQ ID NO: 38844 - DNA, 20 bp, synthetic construct
  source 1..20: mol_type = other DNA
cttgtctaggcactgcctac

SEQ ID NO: 38845 - DNA, 20 bp, synthetic construct
  source 1..20: mol_type = other DNA
tcttgtctaggcactgccta

SEQ ID NO: 38846 - DNA, 20 bp, synthetic construct
  source 1..20: mol_type = other DNA
aactcttgtctaggcactgc

SEQ ID NO: 38847 - DNA, 20 bp, synthetic construct
  source 1..20: mol_type = other DNA
caactcttgtctaggcactg

SEQ ID NO: 38848 - DNA, 20 bp, synthetic construct
  source 1..20: mol_type = other DNA
tcaactcttgtctaggcact

SEQ ID NO: 38849 - DNA, 20 bp, synthetic construct
  source 1..20: mol_type = other DNA
ttcaactcttgtctaggcac

SEQ ID NO: 38850 - DNA, 20 bp, synthetic construct
  source 1..20: mol_type = other DNA
attcaactcttgtctaggca

SEQ ID NO: 38851 - DNA, 20 bp, synthetic construct
  source 1..20: mol_type = other DNA
gattcaactcttgtctaggc

SEQ ID NO: 38852 - DNA, 20 bp, synthetic construct
  source 1..20: mol_type = other DNA
tgattcaactcttgtctagg

SEQ ID NO: 38853 - DNA, 20 bp, synthetic construct
  source 1..20: mol_type = other DNA
gtgattcaactcttgtctag

SEQ ID NO: 38854 - DNA, 20 bp, synthetic construct
  source 1..20: mol_type = other DNA
ggtgattcaactcttgtcta

SEQ ID NO: 38855 - DNA, 20 bp, synthetic construct
  source 1..20: mol_type = other DNA
aggtgattcaactcttgtct

SEQ ID NO: 38856 - DNA, 20 bp, synthetic construct
  source 1..20: mol_type = other DNA
gaggtgattcaactcttgtc

SEQ ID NO: 38857 - DNA, 20 bp, synthetic construct
  source 1..20: mol_type = other DNA
tgaggtgattcaactcttgt

SEQ ID NO: 38858 - DNA, 20 bp, synthetic construct
  source 1..20: mol_type = other DNA
ctgaggtgattcaactcttg

SEQ ID NO: 38859 - DNA, 20 bp, synthetic construct
  source 1..20: mol_type = other DNA
tctgaggtgattcaactctt

SEQ ID NO: 38860 - DNA, 20 bp, synthetic construct
  source 1..20: mol_type = other DNA
ctctgaggtgattcaactct

SEQ ID NO: 38861 - DNA, 20 bp, synthetic construct
  source 1..20: mol_type = other DNA
tctctgaggtgattcaactc

SEQ ID NO: 38862 - DNA, 20 bp, synthetic construct
  source 1..20: mol_type = other DNA
atctctgaggtgattcaact

SEQ ID NO: 38863 - DNA, 20 bp, synthetic construct
  source 1..20: mol_type = other DNA
gatctctgaggtgattcaac

SEQ ID NO: 38864 - DNA, 20 bp, synthetic construct
  source 1..20: mol_type = other DNA
tgatctctgaggtgattcaa

SEQ ID NO: 38865 - DNA, 20 bp, synthetic construct
  source 1..20: mol_type = other DNA
ctgatctctgaggtgattca

SEQ ID NO: 38866 - DNA, 20 bp, synthetic construct
  source 1..20: mol_type = other DNA
actgatctctgaggtgattc

SEQ ID NO: 38867 - DNA, 20 bp, synthetic construct
  source 1..20: mol_type = other DNA
cactgatctctgaggtgatt

SEQ ID NO: 38868 - DNA, 20 bp, synthetic construct
  source 1..20: mol_type = other DNA
gcactgatctctgaggtgat

SEQ ID NO: 38869 - DNA, 20 bp, synthetic construct
  source 1..20: mol_type = other DNA
tgcactgatctctgaggtga

SEQ ID NO: 38870 - DNA, 20 bp, synthetic construct
  source 1..20: mol_type = other DNA
atgcactgatctctgaggtg

SEQ ID NO: 38871 - DNA, 20 bp, synthetic construct
  source 1..20: mol_type = other DNA
tatgcactgatctctgaggt

SEQ ID NO: 38872 - DNA, 20 bp, synthetic construct
  source 1..20: mol_type = other DNA
ctatgcactgatctctgagg

SEQ ID NO: 38873 - DNA, 20 bp, synthetic construct
  source 1..20: mol_type = other DNA
tctatgcactgatctctgag

SEQ ID NO: 38874 - DNA, 20 bp, synthetic construct
  source 1..20: mol_type = other DNA
atctatgcactgatctctga

SEQ ID NO: 38875 - DNA, 20 bp, synthetic construct
  source 1..20: mol_type = other DNA
tatctatgcactgatctctg

SEQ ID NO: 38876 - DNA, 20 bp, synthetic construct
  source 1..20: mol_type = other DNA
atatctatgcactgatctct

SEQ ID NO: 38877 - DNA, 20 bp, synthetic construct
  source 1..20: mol_type = other DNA
catatctatgcactgatctc

SEQ ID NO: 38878 - DNA, 20 bp, synthetic construct
  source 1..20: mol_type = other DNA
acatatctatgcactgatct

SEQ ID NO: 38879 - DNA, 20 bp, synthetic construct
  source 1..20: mol_type = other DNA
gacatatctatgcactgatc

SEQ ID NO: 38880 - DNA, 20 bp, synthetic construct
  source 1..20: mol_type = other DNA
tgacatatctatgcactgat

SEQ ID NO: 38881 - DNA, 20 bp, synthetic construct
  source 1..20: mol_type = other DNA
gtgacatatctatgcactga

SEQ ID NO: 38882 - DNA, 20 bp, synthetic construct
  source 1..20: mol_type = other DNA
tgtgacatatctatgcactg

SEQ ID NO: 38883 - DNA, 20 bp, synthetic construct
  source 1..20: mol_type = other DNA
ttgtgacatatctatgcact

SEQ ID NO: 38884 - DNA, 20 bp, synthetic construct
  source 1..20: mol_type = other DNA
tttgtgacatatctatgcac

SEQ ID NO: 38885 - DNA, 20 bp, synthetic construct
  source 1..20: mol_type = other DNA
ctttgtgacatatctatgca

SEQ ID NO: 38886 - DNA, 20 bp, synthetic construct
  source 1..20: mol_type = other DNA
gctttgtgacatatctatgc

SEQ ID NO: 38887 - DNA, 20 bp, synthetic construct
  source 1..20: mol_type = other DNA
ggctttgtgacatatctatg

SEQ ID NO: 38888 - DNA, 20 bp, synthetic construct
  source 1..20: mol_type = other DNA
aggctttgtgacatatctat

SEQ ID NO: 38889 - DNA, 20 bp, synthetic construct
  source 1..20: mol_type = other DNA
aaggctttgtgacatatcta

SEQ ID NO: 38890 - DNA, 20 bp, synthetic construct
  source 1..20: mol_type = other DNA
gaaggctttgtgacatatct

SEQ ID NO: 38891 - DNA, 20 bp, synthetic construct
  source 1..20: mol_type = other DNA
agaaggctttgtgacatatc

SEQ ID NO: 38892 - DNA, 20 bp, synthetic construct
  source 1..20: mol_type = other DNA
cagaaggctttgtgacatat

SEQ ID NO: 38893 - DNA, 20 bp, synthetic construct
  source 1..20: mol_type = other DNA
acagaaggctttgtgacata

SEQ ID NO: 38894 - DNA, 20 bp, synthetic construct
  source 1..20: mol_type = other DNA
tacagaaggctttgtgacat

SEQ ID NO: 38895 - DNA, 20 bp, synthetic construct
  source 1..20: mol_type = other DNA
ctacagaaggctttgtgaca

SEQ ID NO: 38896 - DNA, 20 bp, synthetic construct
  source 1..20: mol_type = other DNA
cctacagaaggctttgtgac

SEQ ID NO: 38897 - DNA, 20 bp, synthetic construct
  source 1..20: mol_type = other DNA
gcctacagaaggctttgtga

SEQ ID NO: 38898 - DNA, 20 bp, synthetic construct
  source 1..20: mol_type = other DNA
tgcctacagaaggctttgtg

SEQ ID NO: 38899 - DNA, 20 bp, synthetic construct
  source 1..20: mol_type = other DNA
ttgcctacagaaggctttgt

SEQ ID NO: 38900 - DNA, 20 bp, synthetic construct
  source 1..20: mol_type = other DNA
tttgcctacagaaggctttg

SEQ ID NO: 38901 - DNA, 20 bp, synthetic construct
  source 1..20: mol_type = other DNA
ctttgcctacagaaggcttt

SEQ ID NO: 38902 - DNA, 20 bp, synthetic construct
  source 1..20: mol_type = other DNA
gctttgcctacagaaggctt

SEQ ID NO: 38903 - DNA, 20 bp, synthetic construct
  source 1..20: mol_type = other DNA
ggctttgcctacagaaggct

SEQ ID NO: 38904 - DNA, 20 bp, synthetic construct
  source 1..20: mol_type = other DNA
gggctttgcctacagaaggc

SEQ ID NO: 38905 - DNA, 20 bp, synthetic construct
  source 1..20: mol_type = other DNA
tgggctttgcctacagaagg

SEQ ID NO: 38906 - DNA, 20 bp, synthetic construct
  source 1..20: mol_type = other DNA
atgggctttgcctacagaag

SEQ ID NO: 38907 - DNA, 20 bp, synthetic construct
  source 1..20: mol_type = other DNA
tatgggctttgcctacagaa

SEQ ID NO: 38908 - DNA, 20 bp, synthetic construct
  source 1..20: mol_type = other DNA
gtatgggctttgcctacaga

SEQ ID NO: 38909 - DNA, 20 bp, synthetic construct
  source 1..20: mol_type = other DNA
tgtatgggctttgcctacag

SEQ ID NO: 38910 - DNA, 20 bp, synthetic construct
  source 1..20: mol_type = other DNA
ttgtatgggctttgcctaca

SEQ ID NO: 38911 - DNA, 20 bp, synthetic construct
  source 1..20: mol_type = other DNA
cttgtatgggctttgcctac

SEQ ID NO: 38912 - DNA, 20 bp, synthetic construct
  source 1..20: mol_type = other DNA
ccttgtatgggctttgccta

SEQ ID NO: 38913 - DNA, 20 bp, synthetic construct
  source 1..20: mol_type = other DNA
accttgtatgggctttgcct

SEQ ID NO: 38914 - DNA, 20 bp, synthetic construct
  source 1..20: mol_type = other DNA
aaccttgtatgggctttgcc

SEQ ID NO: 38915 - DNA, 20 bp, synthetic construct
  source 1..20: mol_type = other DNA
aaaccttgtatgggctttgc

SEQ ID NO: 38916 - DNA, 20 bp, synthetic construct
  source 1..20: mol_type = other DNA
taaaccttgtatgggctttg

SEQ ID NO: 38917 - DNA, 20 bp, synthetic construct
  source 1..20: mol_type = other DNA
ctaaaccttgtatgggcttt

SEQ ID NO: 38918 - DNA, 20 bp, synthetic construct
  source 1..20: mol_type = other DNA
tctaaaccttgtatgggctt

SEQ ID NO: 38919 - DNA, 20 bp, synthetic construct
  source 1..20: mol_type = other DNA
atctaaaccttgtatgggct

SEQ ID NO: 38920 - DNA, 20 bp, synthetic construct
  source 1..20: mol_type = other DNA
gatctaaaccttgtatgggc

SEQ ID NO: 38921 - DNA, 20 bp, synthetic construct
  source 1..20: mol_type = other DNA
tgatctaaaccttgtatggg

SEQ ID NO: 38922 - DNA, 20 bp, synthetic construct
  source 1..20: mol_type = other DNA
gtgatctaaaccttgtatgg

SEQ ID NO: 38923 - DNA, 20 bp, synthetic construct
  source 1..20: mol_type = other DNA
ggtgatctaaaccttgtatg

SEQ ID NO: 38924 - DNA, 20 bp, synthetic construct
  source 1..20: mol_type = other DNA
aggtgatctaaaccttgtat

SEQ ID NO: 38925 - DNA, 20 bp, synthetic construct
  source 1..20: mol_type = other DNA
taggtgatctaaaccttgta

SEQ ID NO: 38926 - DNA, 20 bp, synthetic construct
  source 1..20: mol_type = other DNA
ctaggtgatctaaaccttgt

SEQ ID NO: 38927 - DNA, 20 bp, synthetic construct
  source 1..20: mol_type = other DNA
cctaggtgatctaaaccttg

SEQ ID NO: 38928 - DNA, 20 bp, synthetic construct
  source 1..20: mol_type = other DNA
acctaggtgatctaaacctt

SEQ ID NO: 38929 - DNA, 20 bp, synthetic construct
  source 1..20: mol_type = other DNA
cacctaggtgatctaaacct

SEQ ID NO: 38930 - DNA, 20 bp, synthetic construct
  source 1..20: mol_type = other DNA
tcacctaggtgatctaaacc

SEQ ID NO: 38931 - DNA, 20 bp, synthetic construct
  source 1..20: mol_type = other DNA
atcacctaggtgatctaaac

SEQ ID NO: 38932 - DNA, 20 bp, synthetic construct
  source 1..20: mol_type = other DNA
gatcacctaggtgatctaaa

SEQ ID NO: 38933 - DNA, 20 bp, synthetic construct
  source 1..20: mol_type = other DNA
tgatcacctaggtgatctaa

SEQ ID NO: 38934 - DNA, 20 bp, synthetic construct
  source 1..20: mol_type = other DNA
ctgatcacctaggtgatcta

SEQ ID NO: 38935 - DNA, 20 bp, synthetic construct
  source 1..20: mol_type = other DNA
actgatcacctaggtgatct

SEQ ID NO: 38936 - DNA, 20 bp, synthetic construct
  source 1..20: mol_type = other DNA
cactgatcacctaggtgatc

SEQ ID NO: 38937 - DNA, 20 bp, synthetic construct
  source 1..20: mol_type = other DNA
gcactgatcacctaggtgat

SEQ ID NO: 38938 - DNA, 20 bp, synthetic construct
  source 1..20: mol_type = other DNA
tgcactgatcacctaggtga

SEQ ID NO: 38939 - DNA, 20 bp, synthetic construct
  source 1..20: mol_type = other DNA
ctgcactgatcacctaggtg

SEQ ID NO: 38940 - DNA, 20 bp, synthetic construct
  source 1..20: mol_type = other DNA
actgcactgatcacctaggt

SEQ ID NO: 38941 - DNA, 20 bp, synthetic construct
  source 1..20: mol_type = other DNA
cactgcactgatcacctagg

SEQ ID NO: 38942 - DNA, 20 bp, synthetic construct
  source 1..20: mol_type = other DNA
tcactgcactgatcacctag

SEQ ID NO: 38943 - DNA, 20 bp, synthetic construct
  source 1..20: mol_type = other DNA
atcactgcactgatcaccta

SEQ ID NO: 38944 - DNA, 20 bp, synthetic construct
  source 1..20: mol_type = other DNA
tatcactgcactgatcacct

SEQ ID NO: 38945 - DNA, 20 bp, synthetic construct
  source 1..20: mol_type = other DNA
atatcactgcactgatcacc

SEQ ID NO: 38946 - DNA, 20 bp, synthetic construct
  source 1..20: mol_type = other DNA
catatcactgcactgatcac

SEQ ID NO: 38947 - DNA, 20 bp, synthetic construct
  source 1..20: mol_type = other DNA
acatatcactgcactgatca

SEQ ID NO: 38948 - DNA, 20 bp, synthetic construct
  source 1..20: mol_type = other DNA
gacatatcactgcactgatc

SEQ ID NO: 38949 - DNA, 20 bp, synthetic construct
  source 1..20: mol_type = other DNA
tgacatatcactgcactgat

SEQ ID NO: 38950 - DNA, 20 bp, synthetic construct
  source 1..20: mol_type = other DNA
gtgacatatcactgcactga

SEQ ID NO: 38951 - DNA, 20 bp, synthetic construct
  source 1..20: mol_type = other DNA
tgtgacatatcactgcactg

SEQ ID NO: 38952 - DNA, 20 bp, synthetic construct
  source 1..20: mol_type = other DNA
ttgtgacatatcactgcact

SEQ ID NO: 38953 - DNA, 20 bp, synthetic construct
  source 1..20: mol_type = other DNA
tttgtgacatatcactgcac

SEQ ID NO: 38954 - DNA, 20 bp, synthetic construct
  source 1..20: mol_type = other DNA
ttttgtgacatatcactgca

SEQ ID NO: 38955 - DNA, 20 bp, synthetic construct
  source 1..20: mol_type = other DNA
tttttgtgacatatcactgc

SEQ ID NO: 38956 - DNA, 20 bp, synthetic construct
  source 1..20: mol_type = other DNA
atttttgtgacatatcactg

SEQ ID NO: 38957 - DNA, 20 bp, synthetic construct
  source 1..20: mol_type = other DNA
gatttttgtgacatatcact

SEQ ID NO: 38958 - DNA, 20 bp, synthetic construct
  source 1..20: mol_type = other DNA
ggatttttgtgacatatcac

SEQ ID NO: 38959 - DNA, 20 bp, synthetic construct
  source 1..20: mol_type = other DNA
gggatttttgtgacatatca

SEQ ID NO: 38960 - DNA, 20 bp, synthetic construct
  source 1..20: mol_type = other DNA
agggatttttgtgacatatc

SEQ ID NO: 38961 - DNA, 20 bp, synthetic construct
  source 1..20: mol_type = other DNA
cagggatttttgtgacatat

SEQ ID NO: 38962 - DNA, 20 bp, synthetic construct
  source 1..20: mol_type = other DNA
acagggatttttgtgacata

SEQ ID NO: 38963 - DNA, 20 bp, synthetic construct
  source 1..20: mol_type = other DNA
tacagggatttttgtgacat

SEQ ID NO: 38964 - DNA, 20 bp, synthetic construct
  source 1..20: mol_type = other DNA
ctacagggatttttgtgaca

SEQ ID NO: 38965 - DNA, 20 bp, synthetic construct
  source 1..20: mol_type = other DNA
tctacagggatttttgtgac

SEQ ID NO: 38966 - DNA, 20 bp, synthetic construct
  source 1..20: mol_type = other DNA
gtctacagggatttttgtga

SEQ ID NO: 38967 - DNA, 20 bp, synthetic construct
  source 1..20: mol_type = other DNA
tgtctacagggatttttgtg

SEQ ID NO: 38968 - DNA, 20 bp, synthetic construct
  source 1..20: mol_type = other DNA
ctgtctacagggatttttgt

SEQ ID NO: 38969 - DNA, 20 bp, synthetic construct
  source 1..20: mol_type = other DNA
tctgtctacagggatttttg

SEQ ID NO: 38970 - DNA, 20 bp, synthetic construct
  source 1..20: mol_type = other DNA
ctctgtctacagggattttt

SEQ ID NO: 38971 - DNA, 20 bp, synthetic construct
  source 1..20: mol_type = other DNA
gctctgtctacagggatttt

SEQ ID NO: 38972 - DNA, 20 bp, synthetic construct
  source 1..20: mol_type = other DNA
ggctctgtctacagggattt

SEQ ID NO: 38973 - DNA, 20 bp, synthetic construct
  source 1..20: mol_type = other DNA
aggctctgtctacagggatt

SEQ ID NO: 38974 - DNA, 20 bp, synthetic construct
  source 1..20: mol_type = other DNA
taggctctgtctacagggat

SEQ ID NO: 38975 - DNA, 20 bp, synthetic construct
  source 1..20: mol_type = other DNA
ctaggctctgtctacaggga

SEQ ID NO: 38976 - DNA, 20 bp, synthetic construct
  source 1..20: mol_type = other DNA
tctaggctctgtctacaggg

SEQ ID NO: 38977 - DNA, 20 bp, synthetic construct
  source 1..20: mol_type = other DNA
gtctaggctctgtctacagg

SEQ ID NO: 38978 - DNA, 20 bp, synthetic construct
  source 1..20: mol_type = other DNA
tgtctaggctctgtctacag

SEQ ID NO: 38979 - DNA, 20 bp, synthetic construct
  source 1..20: mol_type = other DNA
cttgtctaggctctgtctac

SEQ ID NO: 38980 - DNA, 20 bp, synthetic construct
  source 1..20: mol_type = other DNA
tcttgtctaggctctgtcta

SEQ ID NO: 38981 - DNA, 20 bp, synthetic construct
  source 1..20: mol_type = other DNA
actcttgtctaggctctgtc

SEQ ID NO: 38982 - DNA, 20 bp, synthetic construct
  source 1..20: mol_type = other DNA
aactcttgtctaggctctgt

SEQ ID NO: 38983 - DNA, 20 bp, synthetic construct
  source 1..20: mol_type = other DNA
taactcttgtctaggctctg

SEQ ID NO: 38984 - DNA, 20 bp, synthetic construct
  source 1..20: mol_type = other DNA
gtaactcttgtctaggctct

SEQ ID NO: 38985 - DNA, 20 bp, synthetic construct
  source 1..20: mol_type = other DNA
agtaactcttgtctaggctc

SEQ ID NO: 38986 - DNA, 20 bp, synthetic construct
  source 1..20: mol_type = other DNA
aagtaactcttgtctaggct

SEQ ID NO: 38987 - DNA, 20 bp, synthetic construct
  source 1..20: mol_type = other DNA
gaagtaactcttgtctaggc

SEQ ID NO: 38988 - DNA, 20 bp, synthetic construct
  source 1..20: mol_type = other DNA
tgaagtaactcttgtctagg

SEQ ID NO: 38989 - DNA, 20 bp, synthetic construct
  source 1..20: mol_type = other DNA
gtgaagtaactcttgtctag

SEQ ID NO: 38990 - DNA, 20 bp, synthetic construct
  source 1..20: mol_type = other DNA
ggtgaagtaactcttgtcta

SEQ ID NO: 38991 - DNA, 20 bp, synthetic construct
  source 1..20: mol_type = other DNA
aggtgaagtaactcttgtct

SEQ ID NO: 38992 - DNA, 20 bp, synthetic construct
  source 1..20: mol_type = other DNA
caggtgaagtaactcttgtc

SEQ ID NO: 38993 - DNA, 20 bp, synthetic construct
  source 1..20: mol_type = other DNA
ccaggtgaagtaactcttgt

SEQ ID NO: 38994 - DNA, 20 bp, synthetic construct
  source 1..20: mol_type = other DNA
cccaggtgaagtaactcttg

SEQ ID NO: 38995 - DNA, 20 bp, synthetic construct
  source 1..20: mol_type = other DNA
acccaggtgaagtaactctt

SEQ ID NO: 38996 - DNA, 20 bp, synthetic construct
  source 1..20: mol_type = other DNA
cacccaggtgaagtaactct

SEQ ID NO: 38997 - DNA, 20 bp, synthetic construct
  source 1..20: mol_type = other DNA
tcacccaggtgaagtaactc

SEQ ID NO: 38998 - DNA, 20 bp, synthetic construct
  source 1..20: mol_type = other DNA
atcacccaggtgaagtaact

SEQ ID NO: 38999 - DNA, 20 bp, synthetic construct
  source 1..20: mol_type = other DNA
gatcacccaggtgaagtaac

SEQ ID NO: 39000 - DNA, 20 bp, synthetic construct
  source 1..20: mol_type = other DNA
tgatcacccaggtgaagtaa

SEQ ID NO: 39001 - DNA, 20 bp, synthetic construct
  source 1..20: mol_type = other DNA
ctgatcacccaggtgaagta

SEQ ID NO: 39002 - DNA, 20 bp, synthetic construct
  source 1..20: mol_type = other DNA
actgatcacccaggtgaagt

SEQ ID NO: 39003 - DNA, 20 bp, synthetic construct
  source 1..20: mol_type = other DNA
cactgatcacccaggtgaag

SEQ ID NO: 39004 - DNA, 20 bp, synthetic construct
  source 1..20: mol_type = other DNA
gcactgatcacccaggtgaa

SEQ ID NO: 39005 - DNA, 20 bp, synthetic construct
  source 1..20: mol_type = other DNA
atctgcactgatcacccagg

SEQ ID NO: 39006 - DNA, 20 bp, synthetic construct
  source 1..20: mol_type = other DNA
tatctgcactgatcacccag

SEQ ID NO: 39007 - DNA, 20 bp, synthetic construct
  source 1..20: mol_type = other DNA
atatctgcactgatcaccca

SEQ ID NO: 39008 - DNA, 20 bp, synthetic construct
  source 1..20: mol_type = other DNA
aatatctgcactgatcaccc

SEQ ID NO: 39009 - DNA, 20 bp, synthetic construct
  source 1..20: mol_type = other DNA
aaatatctgcactgatcacc

SEQ ID NO: 39010 - DNA, 20 bp, synthetic construct
  source 1..20: mol_type = other DNA
caaatatctgcactgatcac

SEQ ID NO: 39011 - DNA, 20 bp, synthetic construct
  source 1..20: mol_type = other DNA
tcaaatatctgcactgatca

SEQ ID NO: 39012 - DNA, 20 bp, synthetic construct
  source 1..20: mol_type = other DNA
gtcaaatatctgcactgatc

SEQ ID NO: 39013 - DNA, 20 bp, synthetic construct
  source 1..20: mol_type = other DNA
tgtcaaatatctgcactgat

SEQ ID NO: 39014 - DNA, 20 bp, synthetic construct
  source 1..20: mol_type = other DNA
gtgtcaaatatctgcactga

SEQ ID NO: 39015 - DNA, 20 bp, synthetic construct
  source 1..20: mol_type = other DNA
tgtgtcaaatatctgcactg

SEQ ID NO: 39016 - DNA, 20 bp, synthetic construct
  source 1..20: mol_type = other DNA
ttgtgtcaaatatctgcact

SEQ ID NO: 39017 - DNA, 20 bp, synthetic construct
  source 1..20: mol_type = other DNA
attgtgtcaaatatctgcac

SEQ ID NO: 39018 - DNA, 20 bp, synthetic construct
  source 1..20: mol_type = other DNA
cattgtgtcaaatatctgca

SEQ ID NO: 39019 - DNA, 20 bp, synthetic construct
  source 1..20: mol_type = other DNA
gcattgtgtcaaatatctgc

SEQ ID NO: 39020 - DNA, 20 bp, synthetic construct
  source 1..20: mol_type = other DNA
ggcattgtgtcaaatatctg

SEQ ID NO: 39021 - DNA, 20 bp, synthetic construct
  source 1..20: mol_type = other DNA
gggcattgtgtcaaatatct

SEQ ID NO: 39022 - DNA, 20 bp, synthetic construct
  source 1..20: mol_type = other DNA
ggggcattgtgtcaaatatc

SEQ ID NO: 39023 - DNA, 20 bp, synthetic construct
  source 1..20: mol_type = other DNA
gggggcattgtgtcaaatat

SEQ ID NO: 39024 - DNA, 20 bp, synthetic construct
  source 1..20: mol_type = other DNA
tgggggcattgtgtcaaata

SEQ ID NO: 39025 - DNA, 20 bp, synthetic construct
  source 1..20: mol_type = other DNA
atgggggcattgtgtcaaat

SEQ ID NO: 39026 - DNA, 20 bp, synthetic construct
  source 1..20: mol_type = other DNA
tatgggggcattgtgtcaaa

SEQ ID NO: 39027 - DNA, 20 bp, synthetic construct
  source 1..20: mol_type = other DNA
ctatgggggcattgtgtcaa

SEQ ID NO: 39028 - DNA, 20 bp, synthetic construct
  source 1..20: mol_type = other DNA
tctatgggggcattgtgtca

SEQ ID NO: 39029 - DNA, 20 bp, synthetic construct
  source 1..20: mol_type = other DNA
gtctatgggggcattgtgtc

SEQ ID NO: 39030 - DNA, 20 bp, synthetic construct
  source 1..20: mol_type = other DNA
tgtctatgggggcattgtgt

SEQ ID NO: 39031 - DNA, 20 bp, synthetic construct
  source 1..20: mol_type = other DNA
ctgtctatgggggcattgtg

SEQ ID NO: 39032 - DNA, 20 bp, synthetic construct
  source 1..20: mol_type = other DNA
tctgtctatgggggcattgt

SEQ ID NO: 39033 - DNA, 20 bp, synthetic construct
  source 1..20: mol_type = other DNA
ctctgtctatgggggcattg

SEQ ID NO: 39034 - DNA, 20 bp, synthetic construct
  source 1..20: mol_type = other DNA
ctaggctctgtctatggggg

SEQ ID NO: 39035 - DNA, 20 bp, synthetic construct
  source 1..20: mol_type = other DNA
tgcctaggctctgtctatgg

SEQ ID NO: 39036 - DNA, 20 bp, synthetic construct
  source 1..20: mol_type = other DNA
ttgcctaggctctgtctatg

SEQ ID NO: 39037 - DNA, 20 bp, synthetic construct
  source 1..20: mol_type = other DNA
cttgcctaggctctgtctat

SEQ ID NO: 39038 - DNA, 20 bp, synthetic construct
  source 1..20: mol_type = other DNA
aagtcttgcctaggctctgt

SEQ ID NO: 39039 - DNA, 20 bp, synthetic construct
  source 1..20: mol_type = other DNA
gaagtcttgcctaggctctg

SEQ ID NO: 39040 - DNA, 20 bp, synthetic construct
  source 1..20: mol_type = other DNA
ggaagtcttgcctaggctct

SEQ ID NO: 39041 - DNA, 20 bp, synthetic construct
  source 1..20: mol_type = other DNA
tggaagtcttgcctaggctc

SEQ ID NO: 39042 - DNA, 20 bp, synthetic construct
  source 1..20: mol_type = other DNA
atggaagtcttgcctaggct

SEQ ID NO: 39043 - DNA, 20 bp, synthetic construct
  source 1..20: mol_type = other DNA
gatggaagtcttgcctaggc

SEQ ID NO: 39044 - DNA, 20 bp, synthetic construct
  source 1..20: mol_type = other DNA
tgatggaagtcttgcctagg

SEQ ID NO: 39045 - DNA, 20 bp, synthetic construct
  source 1..20: mol_type = other DNA
gtgatggaagtcttgcctag

SEQ ID NO: 39046 - DNA, 20 bp, synthetic construct
  source 1..20: mol_type = other DNA
ggtgatggaagtcttgccta

SEQ ID NO: 39047 - DNA, 20 bp, synthetic construct
  source 1..20: mol_type = other DNA
aggtgatggaagtcttgcct

SEQ ID NO: 39048 - DNA, 20 bp, synthetic construct
  source 1..20: mol_type = other DNA
caggtgatggaagtcttgcc

SEQ ID NO: 39049 - DNA, 20 bp, synthetic construct
  source 1..20: mol_type = other DNA
ccaggtgatggaagtcttgc

SEQ ID NO: 39050 - DNA, 20 bp, synthetic construct
  source 1..20: mol_type = other DNA
cccaggtgatggaagtcttg

SEQ ID NO: 39051 - DNA, 20 bp, synthetic construct
  source 1..20: mol_type = other DNA
acccaggtgatggaagtctt

SEQ ID NO: 39052 - DNA, 20 bp, synthetic construct
  source 1..20: mol_type = other DNA
cacccaggtgatggaagtct

SEQ ID NO: 39053 - DNA, 20 bp, synthetic construct
  source 1..20: mol_type = other DNA
tcacccaggtgatggaagtc

SEQ ID NO: 39054 - DNA, 20 bp, synthetic construct
  source 1..20: mol_type = other DNA
atcacccaggtgatggaagt

SEQ ID NO: 39055 - DNA, 20 bp, synthetic construct
  source 1..20: mol_type = other DNA
gatcacccaggtgatggaag

SEQ ID NO: 39056 - DNA, 20 bp, synthetic construct
  source 1..20: mol_type = other DNA
tgatcacccaggtgatggaa

SEQ ID NO: 39057 - DNA, 20 bp, synthetic construct
  source 1..20: mol_type = other DNA
gacatatctctgcactgatc

SEQ ID NO: 39058 - DNA, 20 bp, synthetic construct
  source 1..20: mol_type = other DNA
tgacatatctctgcactgat

SEQ ID NO: 39059 - DNA, 20 bp, synthetic construct
  source 1..20: mol_type = other DNA
gtgacatatctctgcactga

SEQ ID NO: 39060 - DNA, 20 bp, synthetic construct
  source 1..20: mol_type = other DNA
tgtgacatatctctgcactg

SEQ ID NO: 39061 - DNA, 20 bp, synthetic construct
  source 1..20: mol_type = other DNA
tttgtgacatatctctgcac

SEQ ID NO: 39062 - DNA, 20 bp, synthetic construct
  source 1..20: mol_type = other DNA
atttgtgacatatctctgca

SEQ ID NO: 39063 - DNA, 20 bp, synthetic construct
  source 1..20: mol_type = other DNA
gatttgtgacatatctctgc

SEQ ID NO: 39064 - DNA, 20 bp, synthetic construct
  source 1..20: mol_type = other DNA
ggatttgtgacatatctctg

SEQ ID NO: 39065 - DNA, 20 bp, synthetic construct
  source 1..20: mol_type = other DNA
gggatttgtgacatatctct

SEQ ID NO: 39066 - DNA, 20 bp, synthetic construct
  source 1..20: mol_type = other DNA
ggggatttgtgacatatctc

SEQ ID NO: 39067 - DNA, 20 bp, synthetic construct
  source 1..20: mol_type = other DNA
gggggatttgtgacatatct

SEQ ID NO: 39068 - DNA, 20 bp, synthetic construct
  source 1..20: mol_type = other DNA
agggggatttgtgacatatc

SEQ ID NO: 39069 - DNA, 20 bp, synthetic construct
  source 1..20: mol_type = other DNA
gagggggatttgtgacatat

SEQ ID NO: 39070 - DNA, 20 bp, synthetic construct
  source 1..20: mol_type = other DNA
agagggggatttgtgacata

SEQ ID NO: 39071 - DNA, 20 bp, synthetic construct
  source 1..20: mol_type = other DNA
tagagggggatttgtgacat

SEQ ID NO: 39072 - DNA, 20 bp, synthetic construct
  source 1..20: mol_type = other DNA
ctagagggggatttgtgaca

SEQ ID NO: 39073 - DNA, 20 bp, synthetic construct
  source 1..20: mol_type = other DNA
cctagagggggatttgtgac

SEQ ID NO: 39074 - DNA, 20 bp, synthetic construct
  source 1..20: mol_type = other DNA
gcctagagggggatttgtga

SEQ ID NO: 39075 - DNA, 20 bp, synthetic construct
  source 1..20: mol_type = other DNA
tgcctagagggggatttgtg

SEQ ID NO: 39076 - DNA, 20 bp, synthetic construct
  source 1..20: mol_type = other DNA
ctgcctagagggggatttgt

SEQ ID NO: 39077 - DNA, 20 bp, synthetic construct
  source 1..20: mol_type = other DNA
tctgcctagagggggatttg

SEQ ID NO: 39078 - DNA, 20 bp, synthetic construct
  source 1..20: mol_type = other DNA
ctctgcctagagggggattt

SEQ ID NO: 39079 - DNA, 20 bp, synthetic construct
  source 1..20: mol_type = other DNA
actctgcctagagggggatt

SEQ ID NO: 39080 - DNA, 20 bp, synthetic construct
  source 1..20: mol_type = other DNA
tactctgcctagagggggat

SEQ ID NO: 39081 - DNA, 20 bp, synthetic construct
  source 1..20: mol_type = other DNA
atactctgcctagaggggga

SEQ ID NO: 39082 - DNA, 20 bp, synthetic construct
  source 1..20: mol_type = other DNA
tatactctgcctagaggggg

SEQ ID NO: 39083 - DNA, 20 bp, synthetic construct
  source 1..20: mol_type = other DNA
ctatactctgcctagagggg

SEQ ID NO: 39084 - DNA, 20 bp, synthetic construct
  source 1..20: mol_type = other DNA
tctatactctgcctagaggg

SEQ ID NO: 39085 - DNA, 20 bp, synthetic construct
  source 1..20: mol_type = other DNA
ctctatactctgcctagagg

SEQ ID NO: 39086 - DNA, 20 bp, synthetic construct
  source 1..20: mol_type = other DNA
tctctatactctgcctagag

SEQ ID NO: 39087 - DNA, 20 bp, synthetic construct
  source 1..20: mol_type = other DNA
ttctctatactctgcctaga

SEQ ID NO: 39088 - DNA, 20 bp, synthetic construct
  source 1..20: mol_type = other DNA
cttctctatactctgcctag

SEQ ID NO: 39089 - DNA, 20 bp, synthetic construct
  source 1..20: mol_type = other DNA
tcttctctatactctgccta

SEQ ID NO: 39090 - DNA, 20 bp, synthetic construct
  source 1..20: mol_type = other DNA
ctcttctctatactctgcct

SEQ ID NO: 39091 - DNA, 20 bp, synthetic construct
  source 1..20: mol_type = other DNA
actcttctctatactctgcc

SEQ ID NO: 39092 - DNA, 20 bp, synthetic construct
  source 1..20: mol_type = other DNA
gactcttctctatactctgc

SEQ ID NO: 39093 - DNA, 20 bp, synthetic construct
  source 1..20: mol_type = other DNA
ggactcttctctatactctg

SEQ ID NO: 39094 - DNA, 20 bp, synthetic construct
  source 1..20: mol_type = other DNA
gggactcttctctatactct

SEQ ID NO: 39095 - DNA, 20 bp, synthetic construct
  source 1..20: mol_type = other DNA
tgggactcttctctatactc

SEQ ID NO: 39096 - DNA, 20 bp, synthetic construct
  source 1..20: mol_type = other DNA
atgggactcttctctatact

SEQ ID NO: 39097 - DNA, 20 bp, synthetic construct
  source 1..20: mol_type = other DNA
gatgggactcttctctatac

SEQ ID NO: 39098 - DNA, 20 bp, synthetic construct
  source 1..20: mol_type = other DNA
tgatgggactcttctctata

SEQ ID NO: 39099 - DNA, 20 bp, synthetic construct
  source 1..20: mol_type = other DNA
gtgatgggactcttctctat

SEQ ID NO: 39100 - DNA, 20 bp, synthetic construct
  source 1..20: mol_type = other DNA
ggtgatgggactcttctcta

SEQ ID NO: 39101 - DNA, 20 bp, synthetic construct
  source 1..20: mol_type = other DNA
aggtgatgggactcttctct

SEQ ID NO: 39102 - DNA, 20 bp, synthetic construct
  source 1..20: mol_type = other DNA
caggtgatgggactcttctc

SEQ ID NO: 39103 - DNA, 20 bp, synthetic construct
  source 1..20: mol_type = other DNA
ccaggtgatgggactcttct

SEQ ID NO: 39104 - DNA, 20 bp, synthetic construct
  source 1..20: mol_type = other DNA
cccaggtgatgggactcttc

SEQ ID NO: 39105 - DNA, 20 bp, synthetic construct
  source 1..20: mol_type = other DNA
acccaggtgatgggactctt

SEQ ID NO: 39106 - DNA, 20 bp, synthetic construct
  source 1..20: mol_type = other DNA
cacccaggtgatgggactct

SEQ ID NO: 39107 - DNA, 20 bp, synthetic construct
  source 1..20: mol_type = other DNA
tcacccaggtgatgggactc

SEQ ID NO: 39108 - DNA, 20 bp, synthetic construct
  source 1..20: mol_type = other DNA
atcacccaggtgatgggact

SEQ ID NO: 39109 - DNA, 20 bp, synthetic construct
  source 1..20: mol_type = other DNA
gatcacccaggtgatgggac

SEQ ID NO: 39110 - DNA, 20 bp, synthetic construct
  source 1..20: mol_type = other DNA
tgatcacccaggtgatggga

SEQ ID NO: 39111 - DNA, 20 bp, synthetic construct
  source 1..20: mol_type = other DNA
ctgatcacccaggtgatggg

SEQ ID NO: 39112 - DNA, 20 bp, synthetic construct
  source 1..20: mol_type = other DNA
aatatctctgcactgatcac

SEQ ID NO: 39113 - DNA, 20 bp, synthetic construct
  source 1..20: mol_type = other DNA
aaatatctctgcactgatca

SEQ ID NO: 39114 - DNA, 20 bp, synthetic construct
  source 1..20: mol_type = other DNA
gaaatatctctgcactgatc

SEQ ID NO: 39115 - DNA, 20 bp, synthetic construct
  source 1..20: mol_type = other DNA
tgaaatatctctgcactgat

SEQ ID NO: 39116 - DNA, 20 bp, synthetic construct
  source 1..20: mol_type = other DNA
gtgaaatatctctgcactga

SEQ ID NO: 39117 - DNA, 20 bp, synthetic construct
  source 1..20: mol_type = other DNA
tgtgaaatatctctgcactg

SEQ ID NO: 39118 - DNA, 20 bp, synthetic construct
  source 1..20: mol_type = other DNA
ttgtgaaatatctctgcact

SEQ ID NO: 39119 - DNA, 20 bp, synthetic construct
  source 1..20: mol_type = other DNA
attgtgaaatatctctgcac

SEQ ID NO: 39120 - DNA, 20 bp, synthetic construct
  source 1..20: mol_type = other DNA
cattgtgaaatatctctgca

SEQ ID NO: 39121 - DNA, 20 bp, synthetic construct
  source 1..20: mol_type = other DNA
acattgtgaaatatctctgc

SEQ ID NO: 39122 - DNA, 20 bp, synthetic construct
  source 1..20: mol_type = other DNA
ggacattgtgaaatatctct

SEQ ID NO: 39123 - DNA, 20 bp, synthetic construct
  source 1..20: mol_type = other DNA
gggacattgtgaaatatctc

SEQ ID NO: 39124 - DNA, 20 bp, synthetic construct
  source 1..20: mol_type = other DNA
ggggacattgtgaaatatct

SEQ ID NO: 39125 - DNA, 20 bp, synthetic construct
  source 1..20: mol_type = other DNA
aggggacattgtgaaatatc

SEQ ID NO: 39126 - DNA, 20 bp, synthetic construct
  source 1..20: mol_type = other DNA
caggggacattgtgaaatat

SEQ ID NO: 39127 - DNA, 20 bp, synthetic construct
  source 1..20: mol_type = other DNA
acaggggacattgtgaaata

SEQ ID NO: 39128 - DNA, 20 bp, synthetic construct
  source 1..20: mol_type = other DNA
tacaggggacattgtgaaat

SEQ ID NO: 39129 - DNA, 20 bp, synthetic construct
  source 1..20: mol_type = other DNA
ctacaggggacattgtgaaa

SEQ ID NO: 39130 - DNA, 20 bp, synthetic construct
  source 1..20: mol_type = other DNA
cctacaggggacattgtgaa

SEQ ID NO: 39131 - DNA, 20 bp, synthetic construct
  source 1..20: mol_type = other DNA
gcctacaggggacattgtga

SEQ ID NO: 39132 - DNA, 20 bp, synthetic construct
  source 1..20: mol_type = other DNA
tgcctacaggggacattgtg

SEQ ID NO: 39133 - DNA, 20 bp, synthetic construct
  source 1..20: mol_type = other DNA
ctgcctacaggggacattgt

SEQ ID NO: 39134 - DNA, 20 bp, synthetic construct
  source 1..20: mol_type = other DNA
tctgcctacaggggacattg

SEQ ID NO: 39135 - DNA, 20 bp, synthetic construct
  source 1..20: mol_type = other DNA
ctctgcctacaggggacatt

SEQ ID NO: 39136 - DNA, 20 bp, synthetic construct
  source 1..20: mol_type = other DNA
tctctgcctacaggggacat

SEQ ID NO: 39137 - DNA, 20 bp, synthetic construct
  source 1..20: mol_type = other DNA
actctctgcctacaggggac

SEQ ID NO: 39138 - DNA, 20 bp, synthetic construct
  source 1..20: mol_type = other DNA
tgtccactctctgcctacag

SEQ ID NO: 39139 - DNA, 20 bp, synthetic construct
  source 1..20: mol_type = other DNA
ttgtccactctctgcctaca

SEQ ID NO: 39140 - DNA, 20 bp, synthetic construct
  source 1..20: mol_type = other DNA
aactcttgtccactctctgc

SEQ ID NO: 39141 - DNA, 20 bp, synthetic construct
  source 1..20: mol_type = other DNA
taactcttgtccactctctg

SEQ ID NO: 39142 - DNA, 20 bp, synthetic construct
  source 1..20: mol_type = other DNA
gtaactcttgtccactctct

SEQ ID NO: 39143 - DNA, 20 bp, synthetic construct
  source 1..20: mol_type = other DNA
tgtaactcttgtccactctc

SEQ ID NO: 39144 - DNA, 20 bp, synthetic construct
  source 1..20: mol_type = other DNA
atgtaactcttgtccactct

SEQ ID NO: 39145 - DNA, 20 bp, synthetic construct
  source 1..20: mol_type = other DNA
gatgtaactcttgtccactc

SEQ ID NO: 39146 - DNA, 20 bp, synthetic construct
  source 1..20: mol_type = other DNA
tgatgtaactcttgtccact

SEQ ID NO: 39147 - DNA, 20 bp, synthetic construct
  source 1..20: mol_type = other DNA
gtgatgtaactcttgtccac

SEQ ID NO: 39148 - DNA, 20 bp, synthetic construct
  source 1..20: mol_type = other DNA
ggtgatgtaactcttgtcca

SEQ ID NO: 39149 - DNA, 20 bp, synthetic construct
  source 1..20: mol_type = other DNA
aggtgatgtaactcttgtcc

SEQ ID NO: 39150 - DNA, 20 bp, synthetic construct
  source 1..20: mol_type = other DNA
taggtgatgtaactcttgtc

SEQ ID NO: 39151 - DNA, 20 bp, synthetic construct
  source 1..20: mol_type = other DNA
ctaggtgatgtaactcttgt

SEQ ID NO: 39152 - DNA, 20 bp, synthetic construct
  source 1..20: mol_type = other DNA
tctaggtgatgtaactcttg

SEQ ID NO: 39153 - DNA, 20 bp, synthetic construct
  source 1..20: mol_type = other DNA
atctaggtgatgtaactctt

SEQ ID NO: 39154 - DNA, 20 bp, synthetic construct
  source 1..20: mol_type = other DNA
catctaggtgatgtaactct

SEQ ID NO: 39155 - DNA, 20 bp, synthetic construct
  source 1..20: mol_type = other DNA
tcatctaggtgatgtaactc

SEQ ID NO: 39156 - DNA, 20 bp, synthetic construct
  source 1..20: mol_type = other DNA
atcatctaggtgatgtaact

SEQ ID NO: 39157 - DNA, 20 bp, synthetic construct
  source 1..20: mol_type = other DNA
gatcatctaggtgatgtaac

SEQ ID NO: 39158 - DNA, 20 bp, synthetic construct
  source 1..20: mol_type = other DNA
agatcatctaggtgatgtaa

SEQ ID NO: 39159 - DNA, 20 bp, synthetic construct
  source 1..20: mol_type = other DNA
cagatcatctaggtgatgta

SEQ ID NO: 39160 - DNA, 20 bp, synthetic construct
  source 1..20: mol_type = other DNA
acagatcatctaggtgatgt

SEQ ID NO: 39161 - DNA, 20 bp, synthetic construct
  source 1..20: mol_type = other DNA
cacagatcatctaggtgatg

SEQ ID NO: 39162 - DNA, 20 bp, synthetic construct
  source 1..20: mol_type = other DNA
gcacagatcatctaggtgat

SEQ ID NO: 39163 - DNA, 20 bp, synthetic construct
  source 1..20: mol_type = other DNA
tgcacagatcatctaggtga

SEQ ID NO: 39164 - DNA, 20 bp, synthetic construct
  source 1..20: mol_type = other DNA
ctgcacagatcatctaggtg

SEQ ID NO: 39165 - DNA, 20 bp, synthetic construct
  source 1..20: mol_type = other DNA
tctgcacagatcatctaggt

SEQ ID NO: 39166 - DNA, 20 bp, synthetic construct
  source 1..20: mol_type = other DNA
ctctgcacagatcatctagg

SEQ ID NO: 39167 - DNA, 20 bp, synthetic construct
  source 1..20: mol_type = other DNA
gctctgcacagatcatctag

SEQ ID NO: 39168 - DNA, 20 bp, synthetic construct
  source 1..20: mol_type = other DNA
agctctgcacagatcatcta

SEQ ID NO: 39169 - DNA, 20 bp, synthetic construct
  source 1..20: mol_type = other DNA
tagctctgcacagatcatct

SEQ ID NO: 39170 - DNA, 20 bp, synthetic construct
  source 1..20: mol_type = other DNA
atagctctgcacagatcatc

SEQ ID NO: 39171 - DNA, 20 bp, synthetic construct
  source 1..20: mol_type = other DNA
catagctctgcacagatcat

SEQ ID NO: 39172 - DNA, 20 bp, synthetic construct
  source 1..20: mol_type = other DNA
acatagctctgcacagatca

SEQ ID NO: 39173 - DNA, 20 bp, synthetic construct
  source 1..20: mol_type = other DNA
gacatagctctgcacagatc

SEQ ID NO: 39174 - DNA, 20 bp, synthetic construct
  source 1..20: mol_type = other DNA
tgacatagctctgcacagat

SEQ ID NO: 39175 - DNA, 20 bp, synthetic construct
  source 1..20: mol_type = other DNA
ttgacatagctctgcacaga

SEQ ID NO: 39176 - DNA, 20 bp, synthetic construct
  source 1..20: mol_type = other DNA
tttgacatagctctgcacag

SEQ ID NO: 39177 - DNA, 20 bp, synthetic construct
  source 1..20: mol_type = other DNA
ttttgacatagctctgcaca

SEQ ID NO: 39178 - DNA, 20 bp, synthetic construct
  source 1..20: mol_type = other DNA
gttttgacatagctctgcac

SEQ ID NO: 39179 - DNA, 20 bp, synthetic construct
  source 1..20: mol_type = other DNA
cgttttgacatagctctgca

SEQ ID NO: 39180 - DNA, 20 bp, synthetic construct
  source 1..20: mol_type = other DNA
gcgttttgacatagctctgc

SEQ ID NO: 39181 - DNA, 20 bp, synthetic construct
  source 1..20: mol_type = other DNA
ggcgttttgacatagctctg

SEQ ID NO: 39182 - DNA, 20 bp, synthetic construct
  source 1..20: mol_type = other DNA
gggcgttttgacatagctct

SEQ ID NO: 39183 - DNA, 20 bp, synthetic construct
  source 1..20: mol_type = other DNA
ggggcgttttgacatagctc

SEQ ID NO: 39184 - DNA, 20 bp, synthetic construct
  source 1..20: mol_type = other DNA
aggggcgttttgacatagct

SEQ ID NO: 39185 - DNA, 20 bp, synthetic construct
  source 1..20: mol_type = other DNA
caggggcgttttgacatagc

SEQ ID NO: 39186 - DNA, 20 bp, synthetic construct
  source 1..20: mol_type = other DNA
acaggggcgttttgacatag

SEQ ID NO: 39187 - DNA, 20 bp, synthetic construct
  source 1..20: mol_type = other DNA
tacaggggcgttttgacata

SEQ ID NO: 39188 - DNA, 20 bp, synthetic construct
  source 1..20: mol_type = other DNA
ctacaggggcgttttgacat

SEQ ID NO: 39189 - DNA, 20 bp, synthetic construct
  source 1..20: mol_type = other DNA
cctacaggggcgttttgaca

SEQ ID NO: 39190 - DNA, 20 bp, synthetic construct
  source 1..20: mol_type = other DNA
gcctacaggggcgttttgac

SEQ ID NO: 39191 - DNA, 20 bp, synthetic construct
  source 1..20: mol_type = other DNA
tgcctacaggggcgttttga

SEQ ID NO: 39192 - DNA, 20 bp, synthetic construct
  source 1..20: mol_type = other DNA
ctgcctacaggggcgttttg

SEQ ID NO: 39193 - DNA, 20 bp, synthetic construct
  source 1..20: mol_type = other DNA
atctaggctctgcctacagg

SEQ ID NO: 39194 - DNA, 20 bp, synthetic construct
  source 1..20: mol_type = other DNA
catctaggctctgcctacag

SEQ ID NO: 39195 - DNA, 20 bp, synthetic construct
  source 1..20: mol_type = other DNA
tcatctaggctctgcctaca

SEQ ID NO: 39196 - DNA, 20 bp, synthetic construct
  source 1..20: mol_type = other DNA
ctcatctaggctctgcctac

SEQ ID NO: 39197 - DNA, 20 bp, synthetic construct
  source 1..20: mol_type = other DNA
actcatctaggctctgccta

SEQ ID NO: 39198 - DNA, 20 bp, synthetic construct
  source 1..20: mol_type = other DNA
acactcatctaggctctgcc

SEQ ID NO: 39199 - DNA, 20 bp, synthetic construct
  source 1..20: mol_type = other DNA
aacactcatctaggctctgc

SEQ ID NO: 39200 - DNA, 20 bp, synthetic construct
  source 1..20: mol_type = other DNA
taacactcatctaggctctg

SEQ ID NO: 39201 - DNA, 20 bp, synthetic construct
  source 1..20: mol_type = other DNA
gtaacactcatctaggctct

SEQ ID NO: 39202 - DNA, 20 bp, synthetic construct
  source 1..20: mol_type = other DNA
tgtaacactcatctaggctc

SEQ ID NO: 39203 - DNA, 20 bp, synthetic construct
  source 1..20: mol_type = other DNA
atgtaacactcatctaggct

SEQ ID NO: 39204 - DNA, 20 bp, synthetic construct
  source 1..20: mol_type = other DNA
gatgtaacactcatctaggc

SEQ ID NO: 39205 - DNA, 20 bp, synthetic construct
  source 1..20: mol_type = other DNA
tgatgtaacactcatctagg

SEQ ID NO: 39206 - DNA, 20 bp, synthetic construct
  source 1..20: mol_type = other DNA
gtgatgtaacactcatctag

SEQ ID NO: 39207 - DNA, 20 bp, synthetic construct
  source 1..20: mol_type = other DNA
ggtgatgtaacactcatcta

SEQ ID NO: 39208 - DNA, 20 bp, synthetic construct
  source 1..20: mol_type = other DNA
aggtgatgtaacactcatct

SEQ ID NO: 39209 - DNA, 20 bp, synthetic construct
  source 1..20: mol_type = other DNA
caggtgatgtaacactcatc

SEQ ID NO: 39210 - DNA, 20 bp, synthetic construct
  source 1..20: mol_type = other DNA
ccaggtgatgtaacactcat

SEQ ID NO: 39211 - DNA, 20 bp, synthetic construct
  source 1..20: mol_type = other DNA
cccaggtgatgtaacactca

SEQ ID NO: 39212 - DNA, 20 bp, synthetic construct
  source 1..20: mol_type = other DNA
acccaggtgatgtaacactc

SEQ ID NO: 39213 - DNA, 20 bp, synthetic construct
  source 1..20: mol_type = other DNA
atgatcacccaggtgatgta

SEQ ID NO: 39214 - DNA, 20 bp, synthetic construct
  source 1..20: mol_type = other DNA
aatgatcacccaggtgatgt

SEQ ID NO: 39215 - DNA, 20 bp, synthetic construct
  source 1..20: mol_type = other DNA
caatgatcacccaggtgatg

SEQ ID NO: 39216 - DNA, 20 bp, synthetic construct
  source 1..20: mol_type = other DNA
gcaatgatcacccaggtgat

SEQ ID NO: 39217 - DNA, 20 bp, synthetic construct
  source 1..20: mol_type = other DNA
tgcaatgatcacccaggtga

SEQ ID NO: 39218 - DNA, 20 bp, synthetic construct
  source 1..20: mol_type = other DNA
ctgcaatgatcacccaggtg

SEQ ID NO: 39219 - DNA, 20 bp, synthetic construct
  source 1..20: mol_type = other DNA
tctgcaatgatcacccaggt

SEQ ID NO: 39220 - DNA, 20 bp, synthetic construct
  source 1..20: mol_type = other DNA
ctctgcaatgatcacccagg

SEQ ID NO: 39221 - DNA, 20 bp, synthetic construct
  source 1..20: mol_type = other DNA
tctctgcaatgatcacccag

SEQ ID NO: 39222 - DNA, 20 bp, synthetic construct
  source 1..20: mol_type = other DNA
atctctgcaatgatcaccca

SEQ ID NO: 39223 - DNA, 20 bp, synthetic construct
  source 1..20: mol_type = other DNA
tatctctgcaatgatcaccc

SEQ ID NO: 39224 - DNA, 20 bp, synthetic construct
  source 1..20: mol_type = other DNA
gtatctctgcaatgatcacc

SEQ ID NO: 39225 - DNA, 20 bp, synthetic construct
  source 1..20: mol_type = other DNA
cgtatctctgcaatgatcac

SEQ ID NO: 39226 - DNA, 20 bp, synthetic construct
  source 1..20: mol_type = other DNA
acgtatctctgcaatgatca

SEQ ID NO: 39227 - DNA, 20 bp, synthetic construct
  source 1..20: mol_type = other DNA
gacgtatctctgcaatgatc

SEQ ID NO: 39228 - DNA, 20 bp, synthetic construct
  source 1..20: mol_type = other DNA
tgacgtatctctgcaatgat

SEQ ID NO: 39229 - DNA, 20 bp, synthetic construct
  source 1..20: mol_type = other DNA
gtgacgtatctctgcaatga

SEQ ID NO: 39230 - DNA, 20 bp, synthetic construct
  source 1..20: mol_type = other DNA
tgtgacgtatctctgcaatg

SEQ ID NO: 39231 - DNA, 20 bp, synthetic construct
  source 1..20: mol_type = other DNA
ttgtgacgtatctctgcaat

SEQ ID NO: 39232 - DNA, 20 bp, synthetic construct
  source 1..20: mol_type = other DNA
attgtgacgtatctctgcaa

SEQ ID NO: 39233 - DNA, 20 bp, synthetic construct
  source 1..20: mol_type = other DNA
tattgtgacgtatctctgca

SEQ ID NO: 39234 - DNA, 20 bp, synthetic construct
  source 1..20: mol_type = other DNA
gtattgtgacgtatctctgc

SEQ ID NO: 39235 - DNA, 20 bp, synthetic construct
  source 1..20: mol_type = other DNA
ggtattgtgacgtatctctg

SEQ ID NO: 39236 - DNA, 20 bp, synthetic construct
  source 1..20: mol_type = other DNA
gggtattgtgacgtatctct

SEQ ID NO: 39237 - DNA, 20 bp, synthetic construct
  source 1..20: mol_type = other DNA
ggggtattgtgacgtatctc

SEQ ID NO: 39238 - DNA, 20 bp, synthetic construct
  source 1..20: mol_type = other DNA
gggggtattgtgacgtatct

SEQ ID NO: 39239 - DNA, 20 bp, synthetic construct
  source 1..20: mol_type = other DNA
agggggtattgtgacgtatc

SEQ ID NO: 39240 - DNA, 20 bp, synthetic construct
  source 1..20: mol_type = other DNA
cagggggtattgtgacgtat

SEQ ID NO: 39241 - DNA, 20 bp, synthetic construct
  source 1..20: mol_type = other DNA
acagggggtattgtgacgta

SEQ ID NO: 39242 - DNA, 20 bp, synthetic construct
  source 1..20: mol_type = other DNA
tacagggggtattgtgacgt

SEQ ID NO: 39243 - DNA, 20 bp, synthetic construct
  source 1..20: mol_type = other DNA
ctacagggggtattgtgacg

SEQ ID NO: 39244 - DNA, 20 bp, synthetic construct
  source 1..20: mol_type = other DNA
cctacagggggtattgtgac

SEQ ID NO: 39245 - DNA, 20 bp, synthetic construct
  source 1..20: mol_type = other DNA
acctacagggggtattgtga

SEQ ID NO: 39246 - DNA, 20 bp, synthetic construct
  source 1..20: mol_type = other DNA
cacctacagggggtattgtg

SEQ ID NO: 39247 - DNA, 20 bp, synthetic construct
  source 1..20: mol_type = other DNA
ccacctacagggggtattgt

SEQ ID NO: 39248 - DNA, 20 bp, synthetic construct
  source 1..20: mol_type = other DNA
cccacctacagggggtattg

SEQ ID NO: 39249 - DNA, 20 bp, synthetic construct
  source 1..20: mol_type = other DNA
aactcttgtctaggccccac

SEQ ID NO: 39250 - DNA, 20 bp, synthetic construct
  source 1..20: mol_type = other DNA
taactcttgtctaggcccca

SEQ ID NO: 39251 - DNA, 20 bp, synthetic construct
  source 1..20: mol_type = other DNA
tgtaactcttgtctaggccc

SEQ ID NO: 39252 - DNA, 20 bp, synthetic construct
  source 1..20: mol_type = other DNA
atgtaactcttgtctaggcc

SEQ ID NO: 39253 - DNA, 20 bp, synthetic construct
  source 1..20: mol_type = other DNA
gatgtaactcttgtctaggc

SEQ ID NO: 39254 - DNA, 20 bp, synthetic construct
  source 1..20: mol_type = other DNA
tgatgtaactcttgtctagg

SEQ ID NO: 39255 - DNA, 20 bp, synthetic construct
  source 1..20: mol_type = other DNA
gtgatgtaactcttgtctag

SEQ ID NO: 39256 - DNA, 20 bp, synthetic construct
  source 1..20: mol_type = other DNA
ggtgatgtaactcttgtcta

SEQ ID NO: 39257 - DNA, 20 bp, synthetic construct
  source 1..20: mol_type = other DNA
aggtgatgtaactcttgtct

SEQ ID NO: 39258 - DNA, 20 bp, synthetic construct
  source 1..20: mol_type = other DNA
caggtgatgtaactcttgtc

SEQ ID NO: 39259 - DNA, 20 bp, synthetic construct
  source 1..20: mol_type = other DNA
ccaggtgatgtaactcttgt

SEQ ID NO: 39260 - DNA, 20 bp, synthetic construct
  source 1..20: mol_type = other DNA
cccaggtgatgtaactcttg

SEQ ID NO: 39261 - DNA, 20 bp, synthetic construct
  source 1..20: mol_type = other DNA
acccaggtgatgtaactctt

SEQ ID NO: 39262 - DNA, 20 bp, synthetic construct
  source 1..20: mol_type = other DNA
cacccaggtgatgtaactct

SEQ ID NO: 39263 - DNA, 20 bp, synthetic construct
  source 1..20: mol_type = other DNA
tcacccaggtgatgtaactc

SEQ ID NO: 39264 - DNA, 20 bp, synthetic construct
  source 1..20: mol_type = other DNA
atcacccaggtgatgtaact

SEQ ID NO: 39265 - DNA, 20 bp, synthetic construct
  source 1..20: mol_type = other DNA
tactgatcacccaggtgatg

SEQ ID NO: 39266 - DNA, 20 bp, synthetic construct
  source 1..20: mol_type = other DNA
gtactgatcacccaggtgat

SEQ ID NO: 39267 - DNA, 20 bp, synthetic construct
  source 1..20: mol_type = other DNA
tgtactgatcacccaggtga

SEQ ID NO: 39268 - DNA, 20 bp, synthetic construct
  source 1..20: mol_type = other DNA
ctgtactgatcacccaggtg

SEQ ID NO: 39269 - DNA, 20 bp, synthetic construct
  source 1..20: mol_type = other DNA
tctgtactgatcacccaggt

SEQ ID NO: 39270 - DNA, 20 bp, synthetic construct
  source 1..20: mol_type = other DNA
ttctgtactgatcacccagg

SEQ ID NO: 39271 - DNA, 20 bp, synthetic construct
  source 1..20: mol_type = other DNA
cttctgtactgatcacccag

SEQ ID NO: 39272 - DNA, 20 bp, synthetic construct
  source 1..20: mol_type = other DNA
acttctgtactgatcaccca

SEQ ID NO: 39273 - DNA, 20 bp, synthetic construct
  source 1..20: mol_type = other DNA
tacttctgtactgatcaccc

SEQ ID NO: 39274 - DNA, 20 bp, synthetic construct
  source 1..20: mol_type = other DNA
atacttctgtactgatcacc

SEQ ID NO: 39275 - DNA, 20 bp, synthetic construct
  source 1..20: mol_type = other DNA
catacttctgtactgatcac

SEQ ID NO: 39276 - DNA, 20 bp, synthetic construct
  source 1..20: mol_type = other DNA
acatacttctgtactgatca

SEQ ID NO: 39277 - DNA, 20 bp, synthetic construct
  source 1..20: mol_type = other DNA
gacatacttctgtactgatc

SEQ ID NO: 39278 - DNA, 20 bp, synthetic construct
  source 1..20: mol_type = other DNA
tgacatacttctgtactgat

SEQ ID NO: 39279 - DNA, 20 bp, synthetic construct
  source 1..20: mol_type = other DNA
gtgacatacttctgtactga

SEQ ID NO: 39280 - DNA, 20 bp, synthetic construct
  source 1..20: mol_type = other DNA
tgtgacatacttctgtactg

SEQ ID NO: 39281 - DNA, 20 bp, synthetic construct
  source 1..20: mol_type = other DNA
ttgtgacatacttctgtact

SEQ ID NO: 39282 - DNA, 20 bp, synthetic construct
  source 1..20: mol_type = other DNA
tttgtgacatacttctgtac

SEQ ID NO: 39283 - DNA, 20 bp, synthetic construct
  source 1..20: mol_type = other DNA
ctttgtgacatacttctgta

SEQ ID NO: 39284 - DNA, 20 bp, synthetic construct
  source 1..20: mol_type = other DNA
gctttgtgacatacttctgt

SEQ ID NO: 39285 - DNA, 20 bp, synthetic construct
  source 1..20: mol_type = other DNA
ggctttgtgacatacttctg

SEQ ID NO: 39286 - DNA, 20 bp, synthetic construct
  source 1..20: mol_type = other DNA
gggctttgtgacatacttct

SEQ ID NO: 39287 - DNA, 20 bp, synthetic construct
  source 1..20: mol_type = other DNA
ggggctttgtgacatacttc

SEQ ID NO: 39288 - DNA, 20 bp, synthetic construct
  source 1..20: mol_type = other DNA
aggggctttgtgacatactt

SEQ ID NO: 39289 - DNA, 20 bp, synthetic construct
  source 1..20: mol_type = other DNA
caggggctttgtgacatact

SEQ ID NO: 39290 - DNA, 20 bp, synthetic construct
  source 1..20: mol_type = other DNA
acaggggctttgtgacatac

SEQ ID NO: 39291 - DNA, 20 bp, synthetic construct
  source 1..20: mol_type = other DNA
tacaggggctttgtgacata

SEQ ID NO: 39292 - DNA, 20 bp, synthetic construct
  source 1..20: mol_type = other DNA
ctacaggggctttgtgacat

SEQ ID NO: 39293 - DNA, 20 bp, synthetic construct
  source 1..20: mol_type = other DNA
tgtaactcttgtctaggctc

SEQ ID NO: 39294 - DNA, 20 bp, synthetic construct
  source 1..20: mol_type = other DNA
atgtaactcttgtctaggct

SEQ ID NO: 39295 - DNA, 20 bp, synthetic construct
  source 1..20: mol_type = other DNA
aacccaggtgatgtaactct

SEQ ID NO: 39296 - DNA, 20 bp, synthetic construct
  source 1..20: mol_type = other DNA
taacccaggtgatgtaactc

SEQ ID NO: 39297 - DNA, 20 bp, synthetic construct
  source 1..20: mol_type = other DNA
ataacccaggtgatgtaact

SEQ ID NO: 39298 - DNA, 20 bp, synthetic construct
  source 1..20: mol_type = other DNA
gataacccaggtgatgtaac

SEQ ID NO: 39299 - DNA, 20 bp, synthetic construct
  source 1..20: mol_type = other DNA
tgataacccaggtgatgtaa

SEQ ID NO: 39300 - DNA, 20 bp, synthetic construct
  source 1..20: mol_type = other DNA
ctgataacccaggtgatgta

SEQ ID NO: 39301 - DNA, 20 bp, synthetic construct
  source 1..20: mol_type = other DNA
actgataacccaggtgatgt

SEQ ID NO: 39302 - DNA, 20 bp, synthetic construct
  source 1..20: mol_type = other DNA
cactgataacccaggtgatg

SEQ ID NO: 39303 - DNA, 20 bp, synthetic construct
  source 1..20: mol_type = other DNA
gcactgataacccaggtgat

SEQ ID NO: 39304 - DNA, 20 bp, synthetic construct
  source 1..20: mol_type = other DNA
tgcactgataacccaggtga

SEQ ID NO: 39305 - DNA, 20 bp, synthetic construct
  source 1..20: mol_type = other DNA
ctgcactgataacccaggtg

SEQ ID NO: 39306 - DNA, 20 bp, synthetic construct
  source 1..20: mol_type = other DNA
tctgcactgataacccaggt

SEQ ID NO: 39307 - DNA, 20 bp, synthetic construct
  source 1..20: mol_type = other DNA
ttctgcactgataacccagg

SEQ ID NO: 39308 - DNA, 20 bp, synthetic construct
  source 1..20: mol_type = other DNA
tttctgcactgataacccag

SEQ ID NO: 39309 - DNA, 20 bp, synthetic construct
  source 1..20: mol_type = other DNA
atttctgcactgataaccca

SEQ ID NO: 39310 - DNA, 20 bp, synthetic construct
  source 1..20: mol_type = other DNA
tatttctgcactgataaccc

SEQ ID NO: 39311 - DNA, 20 bp, synthetic construct
  source 1..20: mol_type = other DNA
atatttctgcactgataacc

SEQ ID NO: 39312 - DNA, 20 bp, synthetic construct
  source 1..20: mol_type = other DNA
catatttctgcactgataac

SEQ ID NO: 39313 - DNA, 20 bp, synthetic construct
  source 1..20: mol_type = other DNA
acatatttctgcactgataa

SEQ ID NO: 39314 - DNA, 20 bp, synthetic construct
  source 1..20: mol_type = other DNA
gacatatttctgcactgata

SEQ ID NO: 39315 - DNA, 20 bp, synthetic construct
  source 1..20: mol_type = other DNA
tgacatatttctgcactgat

SEQ ID NO: 39316 - DNA, 20 bp, synthetic construct
  source 1..20: mol_type = other DNA
gtgacatatttctgcactga

SEQ ID NO: 39317 - DNA, 20 bp, synthetic construct
  source 1..20: mol_type = other DNA
tgtgacatatttctgcactg

SEQ ID NO: 39318 - DNA, 20 bp, synthetic construct
  source 1..20: mol_type = other DNA
ttgtgacatatttctgcact

SEQ ID NO: 39319 - DNA, 20 bp, synthetic construct
  source 1..20: mol_type = other DNA
tttgtgacatatttctgcac

SEQ ID NO: 39320 - DNA, 20 bp, synthetic construct
  source 1..20: mol_type = other DNA
ctttgtgacatatttctgca

SEQ ID NO: 39321 - DNA, 20 bp, synthetic construct
  source 1..20: mol_type = other DNA
gctttgtgacatatttctgc

SEQ ID NO: 39322 - DNA, 20 bp, synthetic construct
  source 1..20: mol_type = other DNA
ggctttgtgacatatttctg

SEQ ID NO: 39323 - DNA, 20 bp, synthetic construct
  source 1..20: mol_type = other DNA
gggctttgtgacatatttct

SEQ ID NO: 39324 - DNA, 20 bp, synthetic construct
  source 1..20: mol_type = other DNA
ggggctttgtgacatatttc

SEQ ID NO: 39325 - DNA, 20 bp, synthetic construct
  source 1..20: mol_type = other DNA
aggggctttgtgacatattt

SEQ ID NO: 39326 - DNA, 20 bp, synthetic construct
  source 1..20: mol_type = other DNA
caggggctttgtgacatatt

SEQ ID NO: 39327 - DNA, 20 bp, synthetic construct
  source 1..20: mol_type = other DNA
acaggggctttgtgacatat

SEQ ID NO: 39328 - DNA, 20 bp, synthetic construct
  source 1..20: mol_type = other DNA
acctacaggggctttgtgac

SEQ ID NO: 39329 - DNA, 20 bp, synthetic construct
  source 1..20: mol_type = other DNA
gacctacaggggctttgtga

SEQ ID NO: 39330 - DNA, 20 bp, synthetic construct
  source 1..20: mol_type = other DNA
cgacctacaggggctttgtg

SEQ ID NO: 39331 - DNA, 20 bp, synthetic construct
  source 1..20: mol_type = other DNA
tcgacctacaggggctttgt

SEQ ID NO: 39332 - DNA, 20 bp, synthetic construct
  source 1..20: mol_type = other DNA
ctcgacctacaggggctttg

SEQ ID NO: 39333 - DNA, 20 bp, synthetic construct
  source 1..20: mol_type = other DNA
actcgacctacaggggcttt

SEQ ID NO: 39334 - DNA, 20 bp, synthetic construct
  source 1..20: mol_type = other DNA
gactcgacctacaggggctt

SEQ ID NO: 39335 - DNA, 20 bp, synthetic construct
  source 1..20: mol_type = other DNA
agactcgacctacaggggct

SEQ ID NO: 39336 - DNA, 20 bp, synthetic construct
  source 1..20: mol_type = other DNA
tagactcgacctacaggggc

SEQ ID NO: 39337 - DNA, 20 bp, synthetic construct
  source 1..20: mol_type = other DNA
ctagactcgacctacagggg

SEQ ID NO: 39338 - DNA, 20 bp, synthetic construct
  source 1..20: mol_type = other DNA
tctagactcgacctacaggg

SEQ ID NO: 39339 - DNA, 20 bp, synthetic construct
  source 1..20: mol_type = other DNA
gtctagactcgacctacagg

SEQ ID NO: 39340 - DNA, 20 bp, synthetic construct
  source 1..20: mol_type = other DNA
tgtctagactcgacctacag

SEQ ID NO: 39341 - DNA, 20 bp, synthetic construct
  source 1..20: mol_type = other DNA
ttgtctagactcgacctaca

SEQ ID NO: 39342 - DNA, 20 bp, synthetic construct
  source 1..20: mol_type = other DNA
cttgtctagactcgacctac

SEQ ID NO: 39343 - DNA, 20 bp, synthetic construct
  source 1..20: mol_type = other DNA
tcttgtctagactcgaccta

SEQ ID NO: 39344 - DNA, 20 bp, synthetic construct
  source 1..20: mol_type = other DNA
ctcttgtctagactcgacct

SEQ ID NO: 39345 - DNA, 20 bp, synthetic construct
  source 1..20: mol_type = other DNA
actcttgtctagactcgacc

SEQ ID NO: 39346 - DNA, 20 bp, synthetic construct
  source 1..20: mol_type = other DNA
aactcttgtctagactcgac

SEQ ID NO: 39347 - DNA, 20 bp, synthetic construct
  source 1..20: mol_type = other DNA
taactcttgtctagactcga

SEQ ID NO: 39348 - DNA, 20 bp, synthetic construct
  source 1..20: mol_type = other DNA
gtaactcttgtctagactcg

SEQ ID NO: 39349 - DNA, 20 bp, synthetic construct
  source 1..20: mol_type = other DNA
tgtaactcttgtctagactc

SEQ ID NO: 39350 - DNA, 20 bp, synthetic construct
  source 1..20: mol_type = other DNA
atgtaactcttgtctagact

SEQ ID NO: 39351 - DNA, 20 bp, synthetic construct
  source 1..20: mol_type = other DNA
gatgtaactcttgtctagac

SEQ ID NO: 39352 - DNA, 20 bp, synthetic construct
  source 1..20: mol_type = other DNA
agatgtaactcttgtctaga

SEQ ID NO: 39353 - DNA, 20 bp, synthetic construct
  source 1..20: mol_type = other DNA
gagatgtaactcttgtctag

SEQ ID NO: 39354 - DNA, 20 bp, synthetic construct
  source 1..20: mol_type = other DNA
ggagatgtaactcttgtcta

SEQ ID NO: 39355 - DNA, 20 bp, synthetic construct
  source 1..20: mol_type = other DNA
aggagatgtaactcttgtct

SEQ ID NO: 39356 - DNA, 20 bp, synthetic construct
  source 1..20: mol_type = other DNA
caggagatgtaactcttgtc

SEQ ID NO: 39357 - DNA, 20 bp, synthetic construct
  source 1..20: mol_type = other DNA
ccaggagatgtaactcttgt

SEQ ID NO: 39358 - DNA, 20 bp, synthetic construct
  source 1..20: mol_type = other DNA
cccaggagatgtaactcttg

SEQ ID NO: 39359 - DNA, 20 bp, synthetic construct
  source 1..20: mol_type = other DNA
acccaggagatgtaactctt

SEQ ID NO: 39360 - DNA, 20 bp, synthetic construct
  source 1..20: mol_type = other DNA
cacccaggagatgtaactct

SEQ ID NO: 39361 - DNA, 20 bp, synthetic construct
  source 1..20: mol_type = other DNA
tcacccaggagatgtaactc

SEQ ID NO: 39362 - DNA, 20 bp, synthetic construct
  source 1..20: mol_type = other DNA
atcacccaggagatgtaact

SEQ ID NO: 39363 - DNA, 20 bp, synthetic construct
  source 1..20: mol_type = other DNA
gatcacccaggagatgtaac

SEQ ID NO: 39364 - DNA, 20 bp, synthetic construct
  source 1..20: mol_type = other DNA
tgatcacccaggagatgtaa

SEQ ID NO: 39365 - DNA, 20 bp, synthetic construct
  source 1..20: mol_type = other DNA
ctgatcacccaggagatgta

SEQ ID NO: 39366 - DNA, 20 bp, synthetic construct
  source 1..20: mol_type = other DNA
actgatcacccaggagatgt

SEQ ID NO: 39367 - DNA, 20 bp, synthetic construct
  source 1..20: mol_type = other DNA
cactgatcacccaggagatg

SEQ ID NO: 39368 - DNA, 20 bp, synthetic construct
  source 1..20: mol_type = other DNA
gcactgatcacccaggagat

SEQ ID NO: 39369 - DNA, 20 bp, synthetic construct
  source 1..20: mol_type = other DNA
tgcactgatcacccaggaga

SEQ ID NO: 39370 - DNA, 20 bp, synthetic construct
  source 1..20: mol_type = other DNA
ttgcactgatcacccaggag

SEQ ID NO: 39371 - DNA, 20 bp, synthetic construct
  source 1..20: mol_type = other DNA
tttgcactgatcacccagga

SEQ ID NO: 39372 - DNA, 20 bp, synthetic construct
  source 1..20: mol_type = other DNA
ctttgcactgatcacccagg

SEQ ID NO: 39373 - DNA, 20 bp, synthetic construct
  source 1..20: mol_type = other DNA
tctttgcactgatcacccag

SEQ ID NO: 39374 - DNA, 20 bp, synthetic construct
  source 1..20: mol_type = other DNA
atctttgcactgatcaccca

SEQ ID NO: 39375 - DNA, 20 bp, synthetic construct
  source 1..20: mol_type = other DNA
tatctttgcactgatcaccc

SEQ ID NO: 39376 - DNA, 20 bp, synthetic construct
  source 1..20: mol_type = other DNA
atatctttgcactgatcacc

SEQ ID NO: 39377 - DNA, 20 bp, synthetic construct
  source 1..20: mol_type = other DNA
catatctttgcactgatcac

SEQ ID NO: 39378 - DNA, 20 bp, synthetic construct
  source 1..20: mol_type = other DNA
acatatctttgcactgatca

SEQ ID NO: 39379 - DNA, 20 bp, synthetic construct
  source 1..20: mol_type = other DNA
gacatatctttgcactgatc

SEQ ID NO: 39380 - DNA, 20 bp, synthetic construct
  source 1..20: mol_type = other DNA
tgacatatctttgcactgat

SEQ ID NO: 39381 - DNA, 20 bp, synthetic construct
  source 1..20: mol_type = other DNA
gtgacatatctttgcactga

SEQ ID NO: 39382 - DNA, 20 bp, synthetic construct
  source 1..20: mol_type = other DNA
tgtgacatatctttgcactg

SEQ ID NO: 39383 - DNA, 20 bp, synthetic construct
  source 1..20: mol_type = other DNA
ttgtgacatatctttgcact

SEQ ID NO: 39384 - DNA, 20 bp, synthetic construct
  source 1..20: mol_type = other DNA
tttgtgacatatctttgcac

SEQ ID NO: 39385 - DNA, 20 bp, synthetic construct
  source 1..20: mol_type = other DNA
ctttgtgacatatctttgca

SEQ ID NO: 39386 - DNA, 20 bp, synthetic construct
  source 1..20: mol_type = other DNA
gctttgtgacatatctttgc

SEQ ID NO: 39387 - DNA, 20 bp, synthetic construct
  source 1..20: mol_type = other DNA
ggctttgtgacatatctttg

SEQ ID NO: 39388 - DNA, 20 bp, synthetic construct
  source 1..20: mol_type = other DNA
gggctttgtgacatatcttt

SEQ ID NO: 39389 - DNA, 20 bp, synthetic construct
  source 1..20: mol_type = other DNA
ggggctttgtgacatatctt

SEQ ID NO: 39390 - DNA, 20 bp, synthetic construct
  source 1..20: mol_type = other DNA
gggggctttgtgacatatct

SEQ ID NO: 39391 - DNA, 20 bp, synthetic construct
  source 1..20: mol_type = other DNA
agggggctttgtgacatatc

SEQ ID NO: 39392 - DNA, 20 bp, synthetic construct
  source 1..20: mol_type = other DNA
cagggggctttgtgacatat

SEQ ID NO: 39393 - DNA, 20 bp, synthetic construct
  source 1..20: mol_type = other DNA
acagggggctttgtgacata

SEQ ID NO: 39394 - DNA, 20 bp, synthetic construct
  source 1..20: mol_type = other DNA
tacagggggctttgtgacat

SEQ ID NO: 39395 - DNA, 20 bp, synthetic construct
  source 1..20: mol_type = other DNA
ctacagggggctttgtgaca

SEQ ID NO: 39396 - DNA, 20 bp, synthetic construct
  source 1..20: mol_type = other DNA
tctacagggggctttgtgac

SEQ ID NO: 39397 - DNA, 20 bp, synthetic construct
  source 1..20: mol_type = other DNA
atttgtctacagggggcttt

SEQ ID NO: 39398 - DNA, 20 bp, synthetic construct
  source 1..20: mol_type = other DNA
gatttgtctacagggggctt

SEQ ID NO: 39399 - DNA, 20 bp, synthetic construct
  source 1..20: mol_type = other DNA
ggatttgtctacagggggct

SEQ ID NO: 39400 - DNA, 20 bp, synthetic construct
  source 1..20: mol_type = other DNA
gggatttgtctacagggggc

SEQ ID NO: 39401 - DNA, 20 bp, synthetic construct
  source 1..20: mol_type = other DNA
tgggatttgtctacaggggg

SEQ ID NO: 39402 - DNA, 20 bp, synthetic construct
  source 1..20: mol_type = other DNA
ctgggatttgtctacagggg

SEQ ID NO: 39403 - DNA, 20 bp, synthetic construct
  source 1..20: mol_type = other DNA
tctgggatttgtctacaggg

SEQ ID NO: 39404 - DNA, 20 bp, synthetic construct
  source 1..20: mol_type = other DNA
ttctgggatttgtctacagg

SEQ ID NO: 39405 - DNA, 20 bp, synthetic construct
  source 1..20: mol_type = other DNA
tttctgggatttgtctacag

SEQ ID NO: 39406 - DNA, 20 bp, synthetic construct
  source 1..20: mol_type = other DNA
ttttctgggatttgtctaca

SEQ ID NO: 39407 - DNA, 20 bp, synthetic construct
  source 1..20: mol_type = other DNA
attttctgggatttgtctac

SEQ ID NO: 39408 - DNA, 20 bp, synthetic construct
  source 1..20: mol_type = other DNA
aattttctgggatttgtcta

SEQ ID NO: 39409 - DNA, 20 bp, synthetic construct
  source 1..20: mol_type = other DNA
caattttctgggatttgtct

SEQ ID NO: 39410 - DNA, 20 bp, synthetic construct
  source 1..20: mol_type = other DNA
acaattttctgggatttgtc

SEQ ID NO: 39411 - DNA, 20 bp, synthetic construct
  source 1..20: mol_type = other DNA
aacaattttctgggatttgt

SEQ ID NO: 39412 - DNA, 20 bp, synthetic construct
  source 1..20: mol_type = other DNA
gtaacaattttctgggattt

SEQ ID NO: 39413 - DNA, 20 bp, synthetic construct
  source 1..20: mol_type = other DNA
tgtaacaattttctgggatt

SEQ ID NO: 39414 - DNA, 20 bp, synthetic construct
  source 1..20: mol_type = other DNA
atgtaacaattttctgggat

SEQ ID NO: 39415 - DNA, 20 bp, synthetic construct
  source 1..20: mol_type = other DNA
gatgtaacaattttctggga

SEQ ID NO: 39416 - DNA, 20 bp, synthetic construct
  source 1..20: mol_type = other DNA
tgatgtaacaattttctggg

SEQ ID NO: 39417 - DNA, 20 bp, synthetic construct
  source 1..20: mol_type = other DNA
gtgatgtaacaattttctgg

SEQ ID NO: 39418 - DNA, 20 bp, synthetic construct
  source 1..20: mol_type = other DNA
ggtgatgtaacaattttctg

SEQ ID NO: 39419 - DNA, 20 bp, synthetic construct
  source 1..20: mol_type = other DNA
aggtgatgtaacaattttct

SEQ ID NO: 39420 - DNA, 20 bp, synthetic construct
  source 1..20: mol_type = other DNA
ccaggtgatgtaacaatttt

SEQ ID NO: 39421 - DNA, 20 bp, synthetic construct
  source 1..20: mol_type = other DNA
cccaggtgatgtaacaattt

SEQ ID NO: 39422 - DNA, 20 bp, synthetic construct
  source 1..20: mol_type = other DNA
acccaggtgatgtaacaatt

SEQ ID NO: 39423 - DNA, 20 bp, synthetic construct
  source 1..20: mol_type = other DNA
cacccaggtgatgtaacaat

SEQ ID NO: 39424 - DNA, 20 bp, synthetic construct
  source 1..20: mol_type = other DNA
tcacccaggtgatgtaacaa

SEQ ID NO: 39425 - DNA, 20 bp, synthetic construct
  source 1..20: mol_type = other DNA
ccactgatcacccaggtgat

SEQ ID NO: 39426 - DNA, 20 bp, synthetic construct
  source 1..20: mol_type = other DNA
tccactgatcacccaggtga

SEQ ID NO: 39427 - DNA, 20 bp, synthetic construct
  source 1..20: mol_type = other DNA
ctccactgatcacccaggtg

SEQ ID NO: 39428 - DNA, 20 bp, synthetic construct
  source 1..20: mol_type = other DNA
atctccactgatcacccagg

SEQ ID NO: 39429 - DNA, 20 bp, synthetic construct
  source 1..20: mol_type = other DNA
tatctccactgatcacccag

SEQ ID NO: 39430 - DNA, 20 bp, synthetic construct
  source 1..20: mol_type = other DNA
atatctccactgatcaccca

SEQ ID NO: 39431 - DNA, 20 bp, synthetic construct
  source 1..20: mol_type = other DNA
catatctccactgatcaccc

SEQ ID NO: 39432 - DNA, 20 bp, synthetic construct
  source 1..20: mol_type = other DNA
acatatctccactgatcacc

SEQ ID NO: 39433 - DNA, 20 bp, synthetic construct
  source 1..20: mol_type = other DNA
cacatatctccactgatcac

SEQ ID NO: 39434 - DNA, 20 bp, synthetic construct
  source 1..20: mol_type = other DNA
acacatatctccactgatca

SEQ ID NO: 39435 - DNA, 20 bp, synthetic construct
  source 1..20: mol_type = other DNA
gacacatatctccactgatc

SEQ ID NO: 39436 - DNA, 20 bp, synthetic construct
  source 1..20: mol_type = other DNA
tgacacatatctccactgat

SEQ ID NO: 39437 - DNA, 20 bp, synthetic construct
  source 1..20: mol_type = other DNA
gtgacacatatctccactga

SEQ ID NO: 39438 - DNA, 20 bp, synthetic construct
  source 1..20: mol_type = other DNA
tgtgacacatatctccactg

SEQ ID NO: 39439 - DNA, 20 bp, synthetic construct
  source 1..20: mol_type = other DNA
ttgtgacacatatctccact

SEQ ID NO: 39440 - DNA, 20 bp, synthetic construct
  source 1..20: mol_type = other DNA
attgtgacacatatctccac

SEQ ID NO: 39441 - DNA, 20 bp, synthetic construct
  source 1..20: mol_type = other DNA
aattgtgacacatatctcca

SEQ ID NO: 39442 - DNA, 20 bp, synthetic construct
  source 1..20: mol_type = other DNA
gaattgtgacacatatctcc

SEQ ID NO: 39443 - DNA, 20 bp, synthetic construct
  source 1..20: mol_type = other DNA
ggaattgtgacacatatctc

SEQ ID NO: 39444 - DNA, 20 bp, synthetic construct
  source 1..20: mol_type = other DNA
gggaattgtgacacatatct

SEQ ID NO: 39445 - DNA, 20 bp, synthetic construct
  source 1..20: mol_type = other DNA
ggggaattgtgacacatatc

SEQ ID NO: 39446 - DNA, 20 bp, synthetic construct
  source 1..20: mol_type = other DNA
aggggaattgtgacacatat

SEQ ID NO: 39447 - DNA, 20 bp, synthetic construct
  source 1..20: mol_type = other DNA
aaggggaattgtgacacata

SEQ ID NO: 39448 - DNA, 20 bp, synthetic construct
  source 1..20: mol_type = other DNA
aaaggggaattgtgacacat

SEQ ID NO: 39449 - DNA, 20 bp, synthetic construct
  source 1..20: mol_type = other DNA
taaaggggaattgtgacaca

SEQ ID NO: 39450 - DNA, 20 bp, synthetic construct
  source 1..20: mol_type = other DNA
ctaaaggggaattgtgacac

SEQ ID NO: 39451 - DNA, 20 bp, synthetic construct
  source 1..20: mol_type = other DNA
cctaaaggggaattgtgaca

SEQ ID NO: 39452 - DNA, 20 bp, synthetic construct
  source 1..20: mol_type = other DNA
gcctaaaggggaattgtgac

SEQ ID NO: 39453 - DNA, 20 bp, synthetic construct
  source 1..20: mol_type = other DNA
tgcctaaaggggaattgtga

SEQ ID NO: 39454 - DNA, 20 bp, synthetic construct
  source 1..20: mol_type = other DNA
gtgcctaaaggggaattgtg

SEQ ID NO: 39455 - DNA, 20 bp, synthetic construct
  source 1..20: mol_type = other DNA
tgtgcctaaaggggaattgt

SEQ ID NO: 39456 - DNA, 20 bp, synthetic construct
  source 1..20: mol_type = other DNA
ctgtgcctaaaggggaattg

SEQ ID NO: 39457 - DNA, 20 bp, synthetic construct
  source 1..20: mol_type = other DNA
gctgtgcctaaaggggaatt

SEQ ID NO: 39458 - DNA, 20 bp, synthetic construct
  source 1..20: mol_type = other DNA
agctgtgcctaaaggggaat

SEQ ID NO: 39459 - DNA, 20 bp, synthetic construct
  source 1..20: mol_type = other DNA
aagctgtgcctaaaggggaa

SEQ ID NO: 39460 - DNA, 20 bp, synthetic construct
  source 1..20: mol_type = other DNA
taagctgtgcctaaagggga

SEQ ID NO: 39461 - DNA, 20 bp, synthetic construct
  source 1..20: mol_type = other DNA
ctaagctgtgcctaaagggg

SEQ ID NO: 39462 - DNA, 20 bp, synthetic construct
  source 1..20: mol_type = other DNA
tctaagctgtgcctaaaggg

SEQ ID NO: 39463 - DNA, 20 bp, synthetic construct
  source 1..20: mol_type = other DNA
gtctaagctgtgcctaaagg

SEQ ID NO: 39464 - DNA, 20 bp, synthetic construct
  source 1..20: mol_type = other DNA
tgtctaagctgtgcctaaag

SEQ ID NO: 39465 - DNA, 20 bp, synthetic construct
  source 1..20: mol_type = other DNA
ttgtctaagctgtgcctaaa

SEQ ID NO: 39466 - DNA, 20 bp, synthetic construct
  source 1..20: mol_type = other DNA
cttgtctaagctgtgcctaa

SEQ ID NO: 39467 - DNA, 20 bp, synthetic construct
  source 1..20: mol_type = other DNA
gcttgtctaagctgtgccta

SEQ ID NO: 39468 - DNA, 20 bp, synthetic construct
  source 1..20: mol_type = other DNA
cgcttgtctaagctgtgcct

SEQ ID NO: 39469 - DNA, 20 bp, synthetic construct
  source 1..20: mol_type = other DNA
acgcttgtctaagctgtgcc

SEQ ID NO: 39470 - DNA, 20 bp, synthetic construct
  source 1..20: mol_type = other DNA
aacgcttgtctaagctgtgc

SEQ ID NO: 39471 - DNA, 20 bp, synthetic construct
  source 1..20: mol_type = other DNA
taacgcttgtctaagctgtg

SEQ ID NO: 39472 - DNA, 20 bp, synthetic construct
  source 1..20: mol_type = other DNA
gtaacgcttgtctaagctgt

SEQ ID NO: 39473 - DNA, 20 bp, synthetic construct
  source 1..20: mol_type = other DNA
tgtaacgcttgtctaagctg

SEQ ID NO: 39474 - DNA, 20 bp, synthetic construct
  source 1..20: mol_type = other DNA
atgtaacgcttgtctaagct

SEQ ID NO: 39475 - DNA, 20 bp, synthetic construct
  source 1..20: mol_type = other DNA
gatgtaacgcttgtctaagc

SEQ ID NO: 39476 - DNA, 20 bp, synthetic construct
  source 1..20: mol_type = other DNA
tgatgtaacgcttgtctaag

SEQ ID NO: 39477 - DNA, 20 bp, synthetic construct
  source 1..20: mol_type = other DNA
gtgatgtaacgcttgtctaa

SEQ ID NO: 39478 - DNA, 20 bp, synthetic construct
  source 1..20: mol_type = other DNA
tgtgatgtaacgcttgtcta

SEQ ID NO: 39479 - DNA, 20 bp, synthetic construct
  source 1..20: mol_type = other DNA
atgtgatgtaacgcttgtct

SEQ ID NO: 39480 - DNA, 20 bp, synthetic construct
  source 1..20: mol_type = other DNA
catgtgatgtaacgcttgtc

SEQ ID NO: 39481 - DNA, 20 bp, synthetic construct
  source 1..20: mol_type = other DNA
tcatgtgatgtaacgcttgt

SEQ ID NO: 39482 - DNA, 20 bp, synthetic construct
  source 1..20: mol_type = other DNA
ctcatgtgatgtaacgcttg

SEQ ID NO: 39483 - DNA, 20 bp, synthetic construct
  source 1..20: mol_type = other DNA
actcatgtgatgtaacgctt

SEQ ID NO: 39484 - DNA, 20 bp, synthetic construct
  source 1..20: mol_type = other DNA
cactcatgtgatgtaacgct

SEQ ID NO: 39485 - DNA, 20 bp, synthetic construct
  source 1..20: mol_type = other DNA
tcactcatgtgatgtaacgc

SEQ ID NO: 39486 - DNA, 20 bp, synthetic construct
  source 1..20: mol_type = other DNA
atcactcatgtgatgtaacg

SEQ ID NO: 39487 - DNA, 20 bp, synthetic construct
  source 1..20: mol_type = other DNA
gatcactcatgtgatgtaac

SEQ ID NO: 39488 - DNA, 20 bp, synthetic construct
  source 1..20: mol_type = other DNA
tgatcactcatgtgatgtaa

SEQ ID NO: 39489 - DNA, 20 bp, synthetic construct
  source 1..20: mol_type = other DNA
atgatcactcatgtgatgta

SEQ ID NO: 39490 - DNA, 20 bp, synthetic construct
  source 1..20: mol_type = other DNA
aatgatcactcatgtgatgt

SEQ ID NO: 39491 - DNA, 20 bp, synthetic construct
  source 1..20: mol_type = other DNA
caatgatcactcatgtgatg

SEQ ID NO: 39492 - DNA, 20 bp, synthetic construct
  source 1..20: mol_type = other DNA
gcaatgatcactcatgtgat

SEQ ID NO: 39493 - DNA, 20 bp, synthetic construct
  source 1..20: mol_type = other DNA
tgcaatgatcactcatgtga

SEQ ID NO: 39494 - DNA, 20 bp, synthetic construct
  source 1..20: mol_type = other DNA
ctgcaatgatcactcatgtg

SEQ ID NO: 39495 - DNA, 20 bp, synthetic construct
  source 1..20: mol_type = other DNA
tctgcaatgatcactcatgt

SEQ ID NO: 39496 - DNA, 20 bp, synthetic construct
  source 1..20: mol_type = other DNA
ctctgcaatgatcactcatg

SEQ ID NO: 39497 - DNA, 20 bp, synthetic construct
  source 1..20: mol_type = other DNA
actctgcaatgatcactcat

SEQ ID NO: 39498 - DNA, 20 bp, synthetic construct
  source 1..20: mol_type = other DNA
aactctgcaatgatcactca

SEQ ID NO: 39499 - DNA, 20 bp, synthetic construct
  source 1..20: mol_type = other DNA
taactctgcaatgatcactc

SEQ ID NO: 39500 - DNA, 20 bp, synthetic construct
  source 1..20: mol_type = other DNA
ataactctgcaatgatcact

SEQ ID NO: 39501 - DNA, 20 bp, synthetic construct
  source 1..20: mol_type = other DNA
cataactctgcaatgatcac

SEQ ID NO: 39502 - DNA, 20 bp, synthetic construct
  source 1..20: mol_type = other DNA
acataactctgcaatgatca

SEQ ID NO: 39503 - DNA, 20 bp, synthetic construct
  source 1..20: mol_type = other DNA
gacataactctgcaatgatc

SEQ ID NO: 39504 - DNA, 20 bp, synthetic construct
  source 1..20: mol_type = other DNA
tgacataactctgcaatgat

SEQ ID NO: 39505 - DNA, 20 bp, synthetic construct
  source 1..20: mol_type = other DNA
gtgacataactctgcaatga

SEQ ID NO: 39506 - DNA, 20 bp, synthetic construct
  source 1..20: mol_type = other DNA
agtgacataactctgcaatg

SEQ ID NO: 39507 - DNA, 20 bp, synthetic construct
  source 1..20: mol_type = other DNA
tagtgacataactctgcaat

SEQ ID NO: 39508 - DNA, 20 bp, synthetic construct
  source 1..20: mol_type = other DNA
atagtgacataactctgcaa

SEQ ID NO: 39509 - DNA, 20 bp, synthetic construct
  source 1..20: mol_type = other DNA
catagtgacataactctgca

SEQ ID NO: 39510 - DNA, 20 bp, synthetic construct
  source 1..20: mol_type = other DNA
gcatagtgacataactctgc

SEQ ID NO: 39511 - DNA, 20 bp, synthetic construct
  source 1..20: mol_type = other DNA
ggcatagtgacataactctg

SEQ ID NO: 39512 - DNA, 20 bp, synthetic construct
  source 1..20: mol_type = other DNA
gggcatagtgacataactct

SEQ ID NO: 39513 - DNA, 20 bp, synthetic construct
  source 1..20: mol_type = other DNA
ggggcatagtgacataactc

SEQ ID NO: 39514 - DNA, 20 bp, synthetic construct
  source 1..20: mol_type = other DNA
gggggcatagtgacataact

SEQ ID NO: 39515 - DNA, 20 bp, synthetic construct
  source 1..20: mol_type = other DNA
tgggggcatagtgacataac

SEQ ID NO: 39516 - DNA, 20 bp, synthetic construct
  source 1..20: mol_type = other DNA
atgggggcatagtgacataa

SEQ ID NO: 39517 - DNA, 20 bp, synthetic construct
  source 1..20: mol_type = other DNA
tatgggggcatagtgacata

SEQ ID NO: 39518 - DNA, 20 bp, synthetic construct
  source 1..20: mol_type = other DNA
ctatgggggcatagtgacat

SEQ ID NO: 39519 - DNA, 20 bp, synthetic construct
  source 1..20: mol_type = other DNA
cctatgggggcatagtgaca

SEQ ID NO: 39520 - DNA, 20 bp, synthetic construct
  source 1..20: mol_type = other DNA
gcctatgggggcatagtgac

SEQ ID NO: 39521 - DNA, 20 bp, synthetic construct
  source 1..20: mol_type = other DNA
tgcctatgggggcatagtga

SEQ ID NO: 39522 - DNA, 20 bp, synthetic construct
  source 1..20: mol_type = other DNA
ctgcctatgggggcatagtg

SEQ ID NO: 39523 - DNA, 20 bp, synthetic construct
  source 1..20: mol_type = other DNA
atctgcctatgggggcatag

SEQ ID NO: 39524 - DNA, 20 bp, synthetic construct
  source 1..20: mol_type = other DNA
gatctgcctatgggggcata

SEQ ID NO: 39525 - DNA, 20 bp, synthetic construct
  source 1..20: mol_type = other DNA
cttggatctgcctatggggg

SEQ ID NO: 39526 - DNA, 20 bp, synthetic construct
  source 1..20: mol_type = other DNA
tcttggatctgcctatgggg

SEQ ID NO: 39527 - DNA, 20 bp, synthetic construct
  source 1..20: mol_type = other DNA
gtcttggatctgcctatggg

SEQ ID NO: 39528 - DNA, 20 bp, synthetic construct
  source 1..20: mol_type = other DNA
tgtcttggatctgcctatgg

SEQ ID NO: 39529 - DNA, 20 bp, synthetic construct
  source 1..20: mol_type = other DNA
ttgtcttggatctgcctatg

SEQ ID NO: 39530 - DNA, 20 bp, synthetic construct
  source 1..20: mol_type = other DNA
cttgtcttggatctgcctat

SEQ ID NO: 39531 - DNA, 20 bp, synthetic construct
  source 1..20: mol_type = other DNA
tcttgtcttggatctgccta

SEQ ID NO: 39532 - DNA, 20 bp, synthetic construct
  source 1..20: mol_type = other DNA
ctcttgtcttggatctgcct

SEQ ID NO: 39533 - DNA, 20 bp, synthetic construct
  source 1..20: mol_type = other DNA
actcttgtcttggatctgcc

SEQ ID NO: 39534 - DNA, 20 bp, synthetic construct
  source 1..20: mol_type = other DNA
gactcttgtcttggatctgc

SEQ ID NO: 39535 - DNA, 20 bp, synthetic construct
  source 1..20: mol_type = other DNA
ggactcttgtcttggatctg

SEQ ID NO: 39536 - DNA, 20 bp, synthetic construct
  source 1..20: mol_type = other DNA
tggactcttgtcttggatct

SEQ ID NO: 39537 - DNA, 20 bp, synthetic construct
  source 1..20: mol_type = other DNA
atggactcttgtcttggatc

SEQ ID NO: 39538 - DNA, 20 bp, synthetic construct
  source 1..20: mol_type = other DNA
gatggactcttgtcttggat

SEQ ID NO: 39539 - DNA, 20 bp, synthetic construct
  source 1..20: mol_type = other DNA
tgatggactcttgtcttgga

SEQ ID NO: 39540 - DNA, 20 bp, synthetic construct
  source 1..20: mol_type = other DNA
gtgatggactcttgtcttgg

SEQ ID NO: 39541 - DNA, 20 bp, synthetic construct
  source 1..20: mol_type = other DNA
ggtgatggactcttgtcttg

SEQ ID NO: 39542 - DNA, 20 bp, synthetic construct
  source 1..20: mol_type = other DNA
aggtgatggactcttgtctt

SEQ ID NO: 39543 - DNA, 20 bp, synthetic construct
  source 1..20: mol_type = other DNA
caggtgatggactcttgtct

SEQ ID NO: 39544 - DNA, 20 bp, synthetic construct
  source 1..20: mol_type = other DNA
ccaggtgatggactcttgtc

SEQ ID NO: 39545 - DNA, 20 bp, synthetic construct
  source 1..20: mol_type = other DNA
cccaggtgatggactcttgt

SEQ ID NO: 39546 - DNA, 20 bp, synthetic construct
  source 1..20: mol_type = other DNA
acccaggtgatggactcttg

SEQ ID NO: 39547 - DNA, 20 bp, synthetic construct
  source 1..20: mol_type = other DNA
cacccaggtgatggactctt

SEQ ID NO: 39548 - DNA, 20 bp, synthetic construct
  source 1..20: mol_type = other DNA
tcacccaggtgatggactct

SEQ ID NO: 39549 - DNA, 20 bp, synthetic construct
  source 1..20: mol_type = other DNA
atcacccaggtgatggactc

SEQ ID NO: 39550 - DNA, 20 bp, synthetic construct
  source 1..20: mol_type = other DNA
gatcacccaggtgatggact

SEQ ID NO: 39551 - DNA, 20 bp, synthetic construct
  source 1..20: mol_type = other DNA
ttctgcactgatcacccagg

SEQ ID NO: 39552 - DNA, 20 bp, synthetic construct
  source 1..20: mol_type = other DNA
tttctgcactgatcacccag

SEQ ID NO: 39553 - DNA, 20 bp, synthetic construct
  source 1..20: mol_type = other DNA
atttctgcactgatcaccca

SEQ ID NO: 39554 - DNA, 20 bp, synthetic construct
  source 1..20: mol_type = other DNA
tatttctgcactgatcaccc

SEQ ID NO: 39555 - DNA, 20 bp, synthetic construct
  source 1..20: mol_type = other DNA
atatttctgcactgatcacc

SEQ ID NO: 39556 - DNA, 20 bp, synthetic construct
  source 1..20: mol_type = other DNA
catatttctgcactgatcac

SEQ ID NO: 39557 - DNA, 20 bp, synthetic construct
  source 1..20: mol_type = other DNA
gcatatttctgcactgatca

SEQ ID NO: 39558 - DNA, 20 bp, synthetic construct
  source 1..20: mol_type = other DNA
ggcatatttctgcactgatc

SEQ ID NO: 39559 - DNA, 20 bp, synthetic construct
  source 1..20: mol_type = other DNA
tggcatatttctgcactgat

SEQ ID NO: 39560 - DNA, 20 bp, synthetic construct
  source 1..20: mol_type = other DNA
gtggcatatttctgcactga

SEQ ID NO: 39561 - DNA, 20 bp, synthetic construct
  source 1..20: mol_type = other DNA
tgtggcatatttctgcactg

SEQ ID NO: 39562 - DNA, 20 bp, synthetic construct
  source 1..20: mol_type = other DNA
ttgtggcatatttctgcact

SEQ ID NO: 39563 - DNA, 20 bp, synthetic construct
  source 1..20: mol_type = other DNA
attgtggcatatttctgcac

SEQ ID NO: 39564 - DNA, 20 bp, synthetic construct
  source 1..20: mol_type = other DNA
cattgtggcatatttctgca

SEQ ID NO: 39565 - DNA, 20 bp, synthetic construct
  source 1..20: mol_type = other DNA
gcattgtggcatatttctgc

SEQ ID NO: 39566 - DNA, 20 bp, synthetic construct
  source 1..20: mol_type = other DNA
ggcattgtggcatatttctg

SEQ ID NO: 39567 - DNA, 20 bp, synthetic construct
  source 1..20: mol_type = other DNA
cggcattgtggcatatttct

SEQ ID NO: 39568 - DNA, 20 bp, synthetic construct
  source 1..20: mol_type = other DNA
gcggcattgtggcatatttc

SEQ ID NO: 39569 - DNA, 20 bp, synthetic construct
  source 1..20: mol_type = other DNA
ggcggcattgtggcatattt

SEQ ID NO: 39570 - DNA, 20 bp, synthetic construct
  source 1..20: mol_type = other DNA
tggcggcattgtggcatatt

SEQ ID NO: 39571 - DNA, 20 bp, synthetic construct
  source 1..20: mol_type = other DNA
ctggcggcattgtggcatat

SEQ ID NO: 39572 - DNA, 20 bp, synthetic construct
  source 1..20: mol_type = other DNA
actggcggcattgtggcata

SEQ ID NO: 39573 - DNA, 20 bp, synthetic construct
  source 1..20: mol_type = other DNA
tactggcggcattgtggcat

SEQ ID NO: 39574 - DNA, 20 bp, synthetic construct
  source 1..20: mol_type = other DNA
ctactggcggcattgtggca

SEQ ID NO: 39575 - DNA, 20 bp, synthetic construct
  source 1..20: mol_type = other DNA
tgcctactggcggcattgtg

SEQ ID NO: 39576 - DNA, 20 bp, synthetic construct
  source 1..20: mol_type = other DNA
tctgcctactggcggcattg

SEQ ID NO: 39577 - DNA, 20 bp, synthetic construct
  source 1..20: mol_type = other DNA
atctgcctactggcggcatt

SEQ ID NO: 39578 - DNA, 20 bp, synthetic construct
  source 1..20: mol_type = other DNA
tatctgcctactggcggcat

SEQ ID NO: 39579 - DNA, 20 bp, synthetic construct
  source 1..20: mol_type = other DNA
atatctgcctactggcggca

SEQ ID NO: 39580 - DNA, 20 bp, synthetic construct
  source 1..20: mol_type = other DNA
tatatctgcctactggcggc

SEQ ID NO: 39581 - DNA, 20 bp, synthetic construct
  source 1..20: mol_type = other DNA
ctatatctgcctactggcgg

SEQ ID NO: 39582 - DNA, 20 bp, synthetic construct
  source 1..20: mol_type = other DNA
tctatatctgcctactggcg

SEQ ID NO: 39583 - DNA, 20 bp, synthetic construct
  source 1..20: mol_type = other DNA
gtctatatctgcctactggc

SEQ ID NO: 39584 - DNA, 20 bp, synthetic construct
  source 1..20: mol_type = other DNA
tgtctatatctgcctactgg

SEQ ID NO: 39585 - DNA, 20 bp, synthetic construct
  source 1..20: mol_type = other DNA
ttgtctatatctgcctactg

SEQ ID NO: 39586 - DNA, 20 bp, synthetic construct
  source 1..20: mol_type = other DNA
cttgtctatatctgcctact

SEQ ID NO: 39587 - DNA, 20 bp, synthetic construct
  source 1..20: mol_type = other DNA
tcttgtctatatctgcctac

SEQ ID NO: 39588 - DNA, 20 bp, synthetic construct
  source 1..20: mol_type = other DNA
ctcttgtctatatctgccta

SEQ ID NO: 39589 - DNA, 20 bp, synthetic construct
  source 1..20: mol_type = other DNA
actcttgtctatatctgcct

SEQ ID NO: 39590 - DNA, 20 bp, synthetic construct
  source 1..20: mol_type = other DNA
aactcttgtctatatctgcc

SEQ ID NO: 39591 - DNA, 20 bp, synthetic construct
  source 1..20: mol_type = other DNA
taactcttgtctatatctgc

SEQ ID NO: 39592 - DNA, 20 bp, synthetic construct
  source 1..20: mol_type = other DNA
gtaactcttgtctatatctg

SEQ ID NO: 39593 - DNA, 20 bp, synthetic construct
  source 1..20: mol_type = other DNA
tgtaactcttgtctatatct

SEQ ID NO: 39594 - DNA, 20 bp, synthetic construct
  source 1..20: mol_type = other DNA
atgtaactcttgtctatatc

SEQ ID NO: 39595 - DNA, 20 bp, synthetic construct
  source 1..20: mol_type = other DNA
gatgtaactcttgtctatat

SEQ ID NO: 39596 - DNA, 20 bp, synthetic construct
  source 1..20: mol_type = other DNA
tgatgtaactcttgtctata

SEQ ID NO: 39597 - DNA, 20 bp, synthetic construct
  source 1..20: mol_type = other DNA
gtgatgtaactcttgtctat

SEQ ID NO: 39598 - DNA, 20 bp, synthetic construct
  source 1..20: mol_type = other DNA
gcaggtgatgtaactcttgt

SEQ ID NO: 39599 - DNA, 20 bp, synthetic construct
  source 1..20: mol_type = other DNA
cgcaggtgatgtaactcttg

SEQ ID NO: 39600 - DNA, 20 bp, synthetic construct
  source 1..20: mol_type = other DNA
acgcaggtgatgtaactctt

SEQ ID NO: 39601 - DNA, 20 bp, synthetic construct
  source 1..20: mol_type = other DNA
cacgcaggtgatgtaactct

SEQ ID NO: 39602 - DNA, 20 bp, synthetic construct
  source 1..20: mol_type = other DNA
tcacgcaggtgatgtaactc

SEQ ID NO: 39603 - DNA, 20 bp, synthetic construct
  source 1..20: mol_type = other DNA
atcacgcaggtgatgtaact

SEQ ID NO: 39604 - DNA, 20 bp, synthetic construct
  source 1..20: mol_type = other DNA
gatcacgcaggtgatgtaac

SEQ ID NO: 39605 - DNA, 20 bp, synthetic construct
  source 1..20: mol_type = other DNA
tgatcacgcaggtgatgtaa

SEQ ID NO: 39606 - DNA, 20 bp, synthetic construct
  source 1..20: mol_type = other DNA
gtgatcacgcaggtgatgta

SEQ ID NO: 39607 - DNA, 20 bp, synthetic construct
  source 1..20: mol_type = other DNA
agtgatcacgcaggtgatgt

SEQ ID NO: 39608 - DNA, 20 bp, synthetic construct
  source 1..20: mol_type = other DNA
cagtgatcacgcaggtgatg

SEQ ID NO: 39609 - DNA, 20 bp, synthetic construct
  source 1..20: mol_type = other DNA
gcagtgatcacgcaggtgat

SEQ ID NO: 39610 - DNA, 20 bp, synthetic construct
  source 1..20: mol_type = other DNA
tgcagtgatcacgcaggtga

SEQ ID NO: 39611 - DNA, 20 bp, synthetic construct
  source 1..20: mol_type = other DNA
ctgcagtgatcacgcaggtg

SEQ ID NO: 39612 - DNA, 20 bp, synthetic construct
  source 1..20: mol_type = other DNA
tctgcagtgatcacgcaggt

SEQ ID NO: 39613 - DNA, 20 bp, synthetic construct
  source 1..20: mol_type = other DNA
ctctgcagtgatcacgcagg

SEQ ID NO: 39614 - DNA, 20 bp, synthetic construct
  source 1..20: mol_type = other DNA
tctctgcagtgatcacgcag

SEQ ID NO: 39615 - DNA, 20 bp, synthetic construct
  source 1..20: mol_type = other DNA
atctctgcagtgatcacgca

SEQ ID NO: 39616 - DNA, 20 bp, synthetic construct
  source 1..20: mol_type = other DNA
tatctctgcagtgatcacgc

SEQ ID NO: 39617 - DNA, 20 bp, synthetic construct
  source 1..20: mol_type = other DNA
atatctctgcagtgatcacg

SEQ ID NO: 39618 - DNA, 20 bp, synthetic construct
  source 1..20: mol_type = other DNA
tatatctctgcagtgatcac

SEQ ID NO: 39619 - DNA, 20 bp, synthetic construct
  source 1..20: mol_type = other DNA
atatatctctgcagtgatca

SEQ ID NO: 39620 - DNA, 20 bp, synthetic construct
  source 1..20: mol_type = other DNA
gatatatctctgcagtgatc

SEQ ID NO: 39621 - DNA, 20 bp, synthetic construct
  source 1..20: mol_type = other DNA
tgatatatctctgcagtgat

SEQ ID NO: 39622 - DNA, 20 bp, synthetic construct
  source 1..20: mol_type = other DNA
gtgatatatctctgcagtga

SEQ ID NO: 39623 - DNA, 20 bp, synthetic construct
  source 1..20: mol_type = other DNA
tgtgatatatctctgcagtg

SEQ ID NO: 39624 - DNA, 20 bp, synthetic construct
  source 1..20: mol_type = other DNA
ttgtgatatatctctgcagt

SEQ ID NO: 39625 - DNA, 20 bp, synthetic construct
  source 1..20: mol_type = other DNA
attgtgatatatctctgcag

SEQ ID NO: 39626 - DNA, 20 bp, synthetic construct
  source 1..20: mol_type = other DNA
cattgtgatatatctctgca

SEQ ID NO: 39627 - DNA, 20 bp, synthetic construct
  source 1..20: mol_type = other DNA
gcattgtgatatatctctgc

SEQ ID NO: 39628 - DNA, 20 bp, synthetic construct
  source 1..20: mol_type = other DNA
ggcattgtgatatatctctg

SEQ ID NO: 39629 - DNA, 20 bp, synthetic construct
  source 1..20: mol_type = other DNA
gggcattgtgatatatctct

SEQ ID NO: 39630 - DNA, 20 bp, synthetic construct
  source 1..20: mol_type = other DNA
ggggcattgtgatatatctc

SEQ ID NO: 39631 - DNA, 20 bp, synthetic construct
  source 1..20: mol_type = other DNA
aggggcattgtgatatatct

SEQ ID NO: 39632 - DNA, 20 bp, synthetic construct
  source 1..20: mol_type = other DNA
caggggcattgtgatatatc

SEQ ID NO: 39633 - DNA, 20 bp, synthetic construct
  source 1..20: mol_type = other DNA
acaggggcattgtgatatat

SEQ ID NO: 39634 - DNA, 20 bp, synthetic construct
  source 1..20: mol_type = other DNA
tacaggggcattgtgatata

SEQ ID NO: 39635 - DNA, 20 bp, synthetic construct
  source 1..20: mol_type = other DNA
ctacaggggcattgtgatat

SEQ ID NO: 39636 - DNA, 20 bp, synthetic construct
  source 1..20: mol_type = other DNA
cctacaggggcattgtgata

SEQ ID NO: 39637 - DNA, 20 bp, synthetic construct
  source 1..20: mol_type = other DNA
gcctacaggggcattgtgat

SEQ ID NO: 39638 - DNA, 20 bp, synthetic construct
  source 1..20: mol_type = other DNA
gactcttgtctaggctctgc

SEQ ID NO: 39639 - DNA, 20 bp, synthetic construct
  source 1..20: mol_type = other DNA
ggactcttgtctaggctctg

SEQ ID NO: 39640 - DNA, 20 bp, synthetic construct
  source 1..20: mol_type = other DNA
tgggactcttgtctaggctc

SEQ ID NO: 39641 - DNA, 20 bp, synthetic construct
  source 1..20: mol_type = other DNA
atgggactcttgtctaggct

SEQ ID NO: 39642 - DNA, 20 bp, synthetic construct
  source 1..20: mol_type = other DNA
gatgggactcttgtctaggc

SEQ ID NO: 39643 - DNA, 20 bp, synthetic construct
  source 1..20: mol_type = other DNA
tgatgggactcttgtctagg

SEQ ID NO: 39644 - DNA, 20 bp, synthetic construct
  source 1..20: mol_type = other DNA
gtgatgggactcttgtctag

SEQ ID NO: 39645 - DNA, 20 bp, synthetic construct
  source 1..20: mol_type = other DNA
ggtgatgggactcttgtcta

SEQ ID NO: 39646 - DNA, 20 bp, synthetic construct
  source 1..20: mol_type = other DNA
aggtgatgggactcttgtct

SEQ ID NO: 39647 - DNA, 20 bp, synthetic construct
  source 1..20: mol_type = other DNA
caggtgatgggactcttgtc

SEQ ID NO: 39648 - DNA, 20 bp, synthetic construct
  source 1..20: mol_type = other DNA
ccaggtgatgggactcttgt

SEQ ID NO: 39649 - DNA, 20 bp, synthetic construct
  source 1..20: mol_type = other DNA
cccaggtgatgggactcttg

SEQ ID NO: 39650 - DNA, 20 bp, synthetic construct
  source 1..20: mol_type = other DNA
actctgcactgatcacccag

SEQ ID NO: 39651 - DNA, 20 bp, synthetic construct
  source 1..20: mol_type = other DNA
aactctgcactgatcaccca

SEQ ID NO: 39652 - DNA, 20 bp, synthetic construct
  source 1..20: mol_type = other DNA
taactctgcactgatcaccc

SEQ ID NO: 39653 - DNA, 20 bp, synthetic construct
  source 1..20: mol_type = other DNA
ataactctgcactgatcacc

SEQ ID NO: 39654 - DNA, 20 bp, synthetic construct
  source 1..20: mol_type = other DNA
cataactctgcactgatcac

SEQ ID NO: 39655 - DNA, 20 bp, synthetic construct
  source 1..20: mol_type = other DNA
acataactctgcactgatca

SEQ ID NO: 39656 - DNA, 20 bp, synthetic construct
  source 1..20: mol_type = other DNA
gacataactctgcactgatc

SEQ ID NO: 39657 - DNA, 20 bp, synthetic construct
  source 1..20: mol_type = other DNA
tgacataactctgcactgat

SEQ ID NO: 39658 - DNA, 20 bp, synthetic construct
  source 1..20: mol_type = other DNA
gtgacataactctgcactga

SEQ ID NO: 39659 - DNA, 20 bp, synthetic construct
  source 1..20: mol_type = other DNA
tgtgacataactctgcactg

SEQ ID NO: 39660 - DNA, 20 bp, synthetic construct
  source 1..20: mol_type = other DNA
ttgtgacataactctgcact

SEQ ID NO: 39661 - DNA, 20 bp, synthetic construct
  source 1..20: mol_type = other DNA
attgtgacataactctgcac

SEQ ID NO: 39662 - DNA, 20 bp, synthetic construct
  source 1..20: mol_type = other DNA
cattgtgacataactctgca

SEQ ID NO: 39663 - DNA, 20 bp, synthetic construct
  source 1..20: mol_type = other DNA
gcattgtgacataactctgc

SEQ ID NO: 39664 - DNA, 20 bp, synthetic construct
  source 1..20: mol_type = other DNA
ggcattgtgacataactctg

SEQ ID NO: 39665 - DNA, 20 bp, synthetic construct
  source 1..20: mol_type = other DNA
gggcattgtgacataactct

SEQ ID NO: 39666 - DNA, 20 bp, synthetic construct
  source 1..20: mol_type = other DNA
ggggcattgtgacataactc

SEQ ID NO: 39667 - DNA, 20 bp, synthetic construct
  source 1..20: mol_type = other DNA
gggggcattgtgacataact

SEQ ID NO: 39668 - DNA, 20 bp, synthetic construct
  source 1..20: mol_type = other DNA
agggggcattgtgacataac

SEQ ID NO: 39669 - DNA, 20 bp, synthetic construct
  source 1..20: mol_type = other DNA
aagggggcattgtgacataa

SEQ ID NO: 39670 - DNA, 20 bp, synthetic construct
  source 1..20: mol_type = other DNA
aaagggggcattgtgacata

SEQ ID NO: 39671 - DNA, 20 bp, synthetic construct
  source 1..20: mol_type = other DNA
aaaagggggcattgtgacat

SEQ ID NO: 39672 - DNA, 20 bp, synthetic construct
  source 1..20: mol_type = other DNA
caaaagggggcattgtgaca

SEQ ID NO: 39673 - DNA, 20 bp, synthetic construct
  source 1..20: mol_type = other DNA
ccaaaagggggcattgtgac

SEQ ID NO: 39674 - DNA, 20 bp, synthetic construct
  source 1..20: mol_type = other DNA
gccaaaagggggcattgtga

SEQ ID NO: 39675 - DNA, 20 bp, synthetic construct
  source 1..20: mol_type = other DNA
tgccaaaagggggcattgtg

SEQ ID NO: 39676 - DNA, 20 bp, synthetic construct
  source 1..20: mol_type = other DNA
ctgccaaaagggggcattgt

SEQ ID NO: 39677 - DNA, 20 bp, synthetic construct
  source 1..20: mol_type = other DNA
tctgccaaaagggggcattg

SEQ ID NO: 39678 - DNA, 20 bp, synthetic construct
  source 1..20: mol_type = other DNA
ctctgccaaaagggggcatt

SEQ ID NO: 39679 - DNA, 20 bp, synthetic construct
  source 1..20: mol_type = other DNA
gctctgccaaaagggggcat

SEQ ID NO: 39680 - DNA, 20 bp, synthetic construct
  source 1..20: mol_type = other DNA
ggctctgccaaaagggggca

SEQ ID NO: 39681 - DNA, 20 bp, synthetic construct
  source 1..20: mol_type = other DNA
aggctctgccaaaagggggc

SEQ ID NO: 39682 - DNA, 20 bp, synthetic construct
  source 1..20: mol_type = other DNA
taggctctgccaaaaggggg

SEQ ID NO: 39683 - DNA, 20 bp, synthetic construct
  source 1..20: mol_type = other DNA
ctaggctctgccaaaagggg

SEQ ID NO: 39684 - DNA, 20 bp, synthetic construct
  source 1..20: mol_type = other DNA
tctaggctctgccaaaaggg

SEQ ID NO: 39685 - DNA, 20 bp, synthetic construct
  source 1..20: mol_type = other DNA
gtctaggctctgccaaaagg

SEQ ID NO: 39686 - DNA, 20 bp, synthetic construct
  source 1..20: mol_type = other DNA
tgtctaggctctgccaaaag

SEQ ID NO: 39687 - DNA, 20 bp, synthetic construct
  source 1..20: mol_type = other DNA
ttgtctaggctctgccaaaa

SEQ ID NO: 39688 - DNA, 20 bp, synthetic construct
  source 1..20: mol_type = other DNA
cttgtctaggctctgccaaa

SEQ ID NO: 39689 - DNA, 20 bp, synthetic construct
  source 1..20: mol_type = other DNA
aacccttgtctaggctctgc

SEQ ID NO: 39690 - DNA, 20 bp, synthetic construct
  source 1..20: mol_type = other DNA
taacccttgtctaggctctg

SEQ ID NO: 39691 - DNA, 20 bp, synthetic construct
  source 1..20: mol_type = other DNA
gtaacccttgtctaggctct

SEQ ID NO: 39692 - DNA, 20 bp, synthetic construct
  source 1..20: mol_type = other DNA
tgtaacccttgtctaggctc

SEQ ID NO: 39693 - DNA, 20 bp, synthetic construct
  source 1..20: mol_type = other DNA
atgtaacccttgtctaggct

SEQ ID NO: 39694 - DNA, 20 bp, synthetic construct
  source 1..20: mol_type = other DNA
gatgtaacccttgtctaggc

SEQ ID NO: 39695 - DNA, 20 bp, synthetic construct
  source 1..20: mol_type = other DNA
tgatgtaacccttgtctagg

SEQ ID NO: 39696 - DNA, 20 bp, synthetic construct
  source 1..20: mol_type = other DNA
gtgatgtaacccttgtctag

SEQ ID NO: 39697 - DNA, 20 bp, synthetic construct
  source 1..20: mol_type = other DNA
ggtgatgtaacccttgtcta

SEQ ID NO: 39698 - DNA, 20 bp, synthetic construct
  source 1..20: mol_type = other DNA
aggtgatgtaacccttgtct

SEQ ID NO: 39699 - DNA, 20 bp, synthetic construct
  source 1..20: mol_type = other DNA
ccaggtgatgtaacccttgt

SEQ ID NO: 39700 - DNA, 20 bp, synthetic construct
  source 1..20: mol_type = other DNA
cccaggtgatgtaacccttg

SEQ ID NO: 39701 - DNA, 20 bp, synthetic construct
  source 1..20: mol_type = other DNA
acccaggtgatgtaaccctt

SEQ ID NO: 39702 - DNA, 20 bp, synthetic construct
  source 1..20: mol_type = other DNA
cacccaggtgatgtaaccct

SEQ ID NO: 39703 - DNA, 20 bp, synthetic construct
  source 1..20: mol_type = other DNA
tcacccaggtgatgtaaccc

SEQ ID NO: 39704 - DNA, 20 bp, synthetic construct
  source 1..20: mol_type = other DNA
atcacccaggtgatgtaacc

SEQ ID NO: 39705 - DNA, 20 bp, synthetic construct
  source 1..20: mol_type = other DNA
cattgtgacatatctctgca

SEQ ID NO: 39706 - DNA, 20 bp, synthetic construct
  source 1..20: mol_type = other DNA
acattgtgacatatctctgc

SEQ ID NO: 39707 - DNA, 20 bp, synthetic construct
  source 1..20: mol_type = other DNA
gacattgtgacatatctctg

SEQ ID NO: 39708 - DNA, 20 bp, synthetic construct
  source 1..20: mol_type = other DNA
ggacattgtgacatatctct

SEQ ID NO: 39709 - DNA, 20 bp, synthetic construct
  source 1..20: mol_type = other DNA
gggacattgtgacatatctc

SEQ ID NO: 39710 - DNA, 20 bp, synthetic construct
  source 1..20: mol_type = other DNA
agggacattgtgacatatct

SEQ ID NO: 39711 - DNA, 20 bp, synthetic construct
  source 1..20: mol_type = other DNA
cagggacattgtgacatatc

SEQ ID NO: 39712 - DNA, 20 bp, synthetic construct
  source 1..20: mol_type = other DNA
acagggacattgtgacatat

SEQ ID NO: 39713 - DNA, 20 bp, synthetic construct
  source 1..20: mol_type = other DNA
tacagggacattgtgacata

SEQ ID NO: 39714 - DNA, 20 bp, synthetic construct
  source 1..20: mol_type = other DNA
ctacagggacattgtgacat

SEQ ID NO: 39715 - DNA, 20 bp, synthetic construct
  source 1..20: mol_type = other DNA
gctacagggacattgtgaca

SEQ ID NO: 39716 - DNA, 20 bp, synthetic construct
  source 1..20: mol_type = other DNA
ggctacagggacattgtgac

SEQ ID NO: 39717 - DNA, 20 bp, synthetic construct
  source 1..20: mol_type = other DNA
tggctacagggacattgtga

SEQ ID NO: 39718 - DNA, 20 bp, synthetic construct
  source 1..20: mol_type = other DNA
atggctacagggacattgtg

SEQ ID NO: 39719 - DNA, 20 bp, synthetic construct
  source 1..20: mol_type = other DNA
tatggctacagggacattgt

SEQ ID NO: 39720 - DNA, 20 bp, synthetic construct
  source 1..20: mol_type = other DNA
atatggctacagggacattg

SEQ ID NO: 39721 - DNA, 20 bp, synthetic construct
  source 1..20: mol_type = other DNA
gatatggctacagggacatt

SEQ ID NO: 39722 - DNA, 20 bp, synthetic construct
  source 1..20: mol_type = other DNA
ggatatggctacagggacat

SEQ ID NO: 39723 - DNA, 20 bp, synthetic construct
  source 1..20: mol_type = other DNA
aggatatggctacagggaca

SEQ ID NO: 39724 - DNA, 20 bp, synthetic construct
  source 1..20: mol_type = other DNA
aaggatatggctacagggac

SEQ ID NO: 39725 - DNA, 20 bp, synthetic construct
  source 1..20: mol_type = other DNA
caaggatatggctacaggga

SEQ ID NO: 39726 - DNA, 20 bp, synthetic construct
  source 1..20: mol_type = other DNA
tcaaggatatggctacaggg

SEQ ID NO: 39727 - DNA, 20 bp, synthetic construct
  source 1..20: mol_type = other DNA
gtcaaggatatggctacagg

SEQ ID NO: 39728 - DNA, 20 bp, synthetic construct
  source 1..20: mol_type = other DNA
tgtcaaggatatggctacag

SEQ ID NO: 39729 - DNA, 20 bp, synthetic construct
  source 1..20: mol_type = other DNA
ttgtcaaggatatggctaca

SEQ ID NO: 39730 - DNA, 20 bp, synthetic construct
  source 1..20: mol_type = other DNA
tttgtcaaggatatggctac

SEQ ID NO: 39731 - DNA, 20 bp, synthetic construct
  source 1..20: mol_type = other DNA
ttttgtcaaggatatggcta

SEQ ID NO: 39732 - DNA, 20 bp, synthetic construct
  source 1..20: mol_type = other DNA
cttttgtcaaggatatggct

SEQ ID NO: 39733 - DNA, 20 bp, synthetic construct
  source 1..20: mol_type = other DNA
acttttgtcaaggatatggc

SEQ ID NO: 39734 - DNA, 20 bp, synthetic construct
  source 1..20: mol_type = other DNA
cacttttgtcaaggatatgg

SEQ ID NO: 39735 - DNA, 20 bp, synthetic construct
  source 1..20: mol_type = other DNA
tcacttttgtcaaggatatg

SEQ ID NO: 39736 - DNA, 20 bp, synthetic construct
  source 1..20: mol_type = other DNA
gtcacttttgtcaaggatat

SEQ ID NO: 39737 - DNA, 20 bp, synthetic construct
  source 1..20: mol_type = other DNA
tgtcacttttgtcaaggata

SEQ ID NO: 39738 - DNA, 20 bp, synthetic construct
  source 1..20: mol_type = other DNA
atgtcacttttgtcaaggat

SEQ ID NO: 39739 - DNA, 20 bp, synthetic construct
  source 1..20: mol_type = other DNA
gatgtcacttttgtcaagga

SEQ ID NO: 39740 - DNA, 20 bp, synthetic construct
  source 1..20: mol_type = other DNA
tgatgtcacttttgtcaagg

SEQ ID NO: 39741 - DNA, 20 bp, synthetic construct
  source 1..20: mol_type = other DNA
gtgatgtcacttttgtcaag

SEQ ID NO: 39742 - DNA, 20 bp, synthetic construct
  source 1..20: mol_type = other DNA
ggtgatgtcacttttgtcaa

SEQ ID NO: 39743 - DNA, 20 bp, synthetic construct
  source 1..20: mol_type = other DNA
aggtgatgtcacttttgtca

SEQ ID NO: 39744 - DNA, 20 bp, synthetic construct
  source 1..20: mol_type = other DNA
caggtgatgtcacttttgtc

SEQ ID NO: 39745 - DNA, 20 bp, synthetic construct
  source 1..20: mol_type = other DNA
ccaggtgatgtcacttttgt

SEQ ID NO: 39746 - DNA, 20 bp, synthetic construct
  source 1..20: mol_type = other DNA
cccaggtgatgtcacttttg

SEQ ID NO: 39747 - DNA, 20 bp, synthetic construct
  source 1..20: mol_type = other DNA
acccaggtgatgtcactttt

SEQ ID NO: 39748 - DNA, 20 bp, synthetic construct
  source 1..20: mol_type = other DNA
cacccaggtgatgtcacttt

SEQ ID NO: 39749 - DNA, 20 bp, synthetic construct
  source 1..20: mol_type = other DNA
tcacccaggtgatgtcactt

SEQ ID NO: 39750 - DNA, 20 bp, synthetic construct
  source 1..20: mol_type = other DNA
atcacccaggtgatgtcact

SEQ ID NO: 39751 - DNA, 20 bp, synthetic construct
  source 1..20: mol_type = other DNA
gatcacccaggtgatgtcac

SEQ ID NO: 39752 - DNA, 20 bp, synthetic construct
  source 1..20: mol_type = other DNA
tgatcacccaggtgatgtca

SEQ ID NO: 39753 - DNA, 20 bp, synthetic construct
  source 1..20: mol_type = other DNA
ctgatcacccaggtgatgtc

SEQ ID NO: 39754 - DNA, 20 bp, synthetic construct
  source 1..20: mol_type = other DNA
acactgatcacccaggtgat

SEQ ID NO: 39755 - DNA, 20 bp, synthetic construct
  source 1..20: mol_type = other DNA
cacactgatcacccaggtga

SEQ ID NO: 39756 - DNA, 20 bp, synthetic construct
  source 1..20: mol_type = other DNA
ccacactgatcacccaggtg

SEQ ID NO: 39757 - DNA, 20 bp, synthetic construct
  source 1..20: mol_type = other DNA
tccacactgatcacccaggt

SEQ ID NO: 39758 - DNA, 20 bp, synthetic construct
  source 1..20: mol_type = other DNA
ctccacactgatcacccagg

SEQ ID NO: 39759 - DNA, 20 bp, synthetic construct
  source 1..20: mol_type = other DNA
tctccacactgatcacccag

SEQ ID NO: 39760 - DNA, 20 bp, synthetic construct
  source 1..20: mol_type = other DNA
atctccacactgatcaccca

SEQ ID NO: 39761 - DNA, 20 bp, synthetic construct
  source 1..20: mol_type = other DNA
tatctccacactgatcaccc

SEQ ID NO: 39762 - DNA, 20 bp, synthetic construct
  source 1..20: mol_type = other DNA
atatctccacactgatcacc

SEQ ID NO: 39763 - DNA, 20 bp, synthetic construct
  source 1..20: mol_type = other DNA
catatctccacactgatcac

SEQ ID NO: 39764 - DNA, 20 bp, synthetic construct
  source 1..20: mol_type = other DNA
acatatctccacactgatca

SEQ ID NO: 39765 - DNA, 20 bp, synthetic construct
  source 1..20: mol_type = other DNA
gacatatctccacactgatc

SEQ ID NO: 39766 - DNA, 20 bp, synthetic construct
  source 1..20: mol_type = other DNA
tgacatatctccacactgat

SEQ ID NO: 39767 - DNA, 20 bp, synthetic construct
  source 1..20: mol_type = other DNA
gtgacatatctccacactga

SEQ ID NO: 39768 - DNA, 20 bp, synthetic construct
  source 1..20: mol_type = other DNA
tgtgacatatctccacactg

SEQ ID NO: 39769 - DNA, 20 bp, synthetic construct
  source 1..20: mol_type = other DNA
ttgtgacatatctccacact

SEQ ID NO: 39770 - DNA, 20 bp, synthetic construct
  source 1..20: mol_type = other DNA
attgtgacatatctccacac

SEQ ID NO: 39771 - DNA, 20 bp, synthetic construct
  source 1..20: mol_type = other DNA
cattgtgacatatctccaca

SEQ ID NO: 39772 - DNA, 20 bp, synthetic construct
  source 1..20: mol_type = other DNA
acattgtgacatatctccac

SEQ ID NO: 39773 - DNA, 20 bp, synthetic construct
  source 1..20: mol_type = other DNA
gacattgtgacatatctcca

SEQ ID NO: 39774 - DNA, 20 bp, synthetic construct
  source 1..20: mol_type = other DNA
agacattgtgacatatctcc

SEQ ID NO: 39775 - DNA, 20 bp, synthetic construct
  source 1..20: mol_type = other DNA
gagacattgtgacatatctc

SEQ ID NO: 39776 - DNA, 20 bp, synthetic construct
  source 1..20: mol_type = other DNA
ggagacattgtgacatatct

SEQ ID NO: 39777 - DNA, 20 bp, synthetic construct
  source 1..20: mol_type = other DNA
tggagacattgtgacatatc

SEQ ID NO: 39778 - DNA, 20 bp, synthetic construct
  source 1..20: mol_type = other DNA
ctggagacattgtgacatat

SEQ ID NO: 39779 - DNA, 20 bp, synthetic construct
  source 1..20: mol_type = other DNA
actggagacattgtgacata

SEQ ID NO: 39780 - DNA, 20 bp, synthetic construct
  source 1..20: mol_type = other DNA
tactggagacattgtgacat

SEQ ID NO: 39781 - DNA, 20 bp, synthetic construct
  source 1..20: mol_type = other DNA
ctactggagacattgtgaca

SEQ ID NO: 39782 - DNA, 20 bp, synthetic construct
  source 1..20: mol_type = other DNA
cctactggagacattgtgac

SEQ ID NO: 39783 - DNA, 20 bp, synthetic construct
  source 1..20: mol_type = other DNA
gcctactggagacattgtga

SEQ ID NO: 39784 - DNA, 20 bp, synthetic construct
  source 1..20: mol_type = other DNA
tgcctactggagacattgtg

SEQ ID NO: 39785 - DNA, 20 bp, synthetic construct
  source 1..20: mol_type = other DNA
ctgcctactggagacattgt

SEQ ID NO: 39786 - DNA, 20 bp, synthetic construct
  source 1..20: mol_type = other DNA
tctgcctactggagacattg

SEQ ID NO: 39787 - DNA, 20 bp, synthetic construct
  source 1..20: mol_type = other DNA
ctctgcctactggagacatt

SEQ ID NO: 39788 - DNA, 20 bp, synthetic construct
  source 1..20: mol_type = other DNA
gctctgcctactggagacat

SEQ ID NO: 39789 - DNA, 20 bp, synthetic construct
  source 1..20: mol_type = other DNA
aggctctgcctactggagac

SEQ ID NO: 39790 - DNA, 20 bp, synthetic construct
  source 1..20: mol_type = other DNA
taggctctgcctactggaga

SEQ ID NO: 39791 - DNA, 20 bp, synthetic construct
  source 1..20: mol_type = other DNA
ctaggctctgcctactggag

SEQ ID NO: 39792 - DNA, 20 bp, synthetic construct
  source 1..20: mol_type = other DNA
tgtctaggctctgcctactg

SEQ ID NO: 39793 - DNA, 20 bp, synthetic construct
  source 1..20: mol_type = other DNA
ttgtctaggctctgcctact

SEQ ID NO: 39794 - DNA, 20 bp, synthetic construct
  source 1..20: mol_type = other DNA
cctgatcacccaggtgatgt

SEQ ID NO: 39795 - DNA, 20 bp, synthetic construct
  source 1..20: mol_type = other DNA
ccctgatcacccaggtgatg

SEQ ID NO: 39796 - DNA, 20 bp, synthetic construct
  source 1..20: mol_type = other DNA
atatctctgccctgatcacc

SEQ ID NO: 39797 - DNA, 20 bp, synthetic construct
  source 1..20: mol_type = other DNA
catatctctgccctgatcac

SEQ ID NO: 39798 - DNA, 20 bp, synthetic construct
  source 1..20: mol_type = other DNA
acatatctctgccctgatca

SEQ ID NO: 39799 - DNA, 20 bp, synthetic construct
  source 1..20: mol_type = other DNA
gacatatctctgccctgatc

SEQ ID NO: 39800 - DNA, 20 bp, synthetic construct
  source 1..20: mol_type = other DNA
tgacatatctctgccctgat

SEQ ID NO: 39801 - DNA, 20 bp, synthetic construct
  source 1..20: mol_type = other DNA
gtgacatatctctgccctga

SEQ ID NO: 39802 - DNA, 20 bp, synthetic construct
  source 1..20: mol_type = other DNA
tgtgacatatctctgccctg

SEQ ID NO: 39803 - DNA, 20 bp, synthetic construct
  source 1..20: mol_type = other DNA
ttgtgacatatctctgccct

SEQ ID NO: 39804 - DNA, 20 bp, synthetic construct
  source 1..20: mol_type = other DNA
attgtgacatatctctgccc

SEQ ID NO: 39805 - DNA, 20 bp, synthetic construct
  source 1..20: mol_type = other DNA
cattgtgacatatctctgcc

SEQ ID NO: 39806 - DNA, 20 bp, synthetic construct
  source 1..20: mol_type = other DNA
gcattgtgacatatctctgc

SEQ ID NO: 39807 - DNA, 20 bp, synthetic construct
  source 1..20: mol_type = other DNA
ggcattgtgacatatctctg

SEQ ID NO: 39808 - DNA, 20 bp, synthetic construct
  source 1..20: mol_type = other DNA
gggcattgtgacatatctct

SEQ ID NO: 39809 - DNA, 20 bp, synthetic construct
  source 1..20: mol_type = other DNA
ggggcattgtgacatatctc

SEQ ID NO: 39810 - DNA, 20 bp, synthetic construct
  source 1..20: mol_type = other DNA
gggggcattgtgacatatct

SEQ ID NO: 39811 - DNA, 20 bp, synthetic construct
  source 1..20: mol_type = other DNA
agggggcattgtgacatatc

SEQ ID NO: 39812 - DNA, 20 bp, synthetic construct
  source 1..20: mol_type = other DNA
cagggggcattgtgacatat

SEQ ID NO: 39813 - DNA, 20 bp, synthetic construct
  source 1..20: mol_type = other DNA
acagggggcattgtgacata

SEQ ID NO: 39814 - DNA, 20 bp, synthetic construct
  source 1..20: mol_type = other DNA
tacagggggcattgtgacat

SEQ ID NO: 39815 - DNA, 20 bp, synthetic construct
  source 1..20: mol_type = other DNA
ttacagggggcattgtgaca

SEQ ID NO: 39816 - DNA, 20 bp, synthetic construct
  source 1..20: mol_type = other DNA
cttacagggggcattgtgac

SEQ ID NO: 39817 - DNA, 20 bp, synthetic construct
  source 1..20: mol_type = other DNA
gcttacagggggcattgtga

SEQ ID NO: 39818 - DNA, 20 bp, synthetic construct
  source 1..20: mol_type = other DNA
tgcttacagggggcattgtg

SEQ ID NO: 39819 - DNA, 20 bp, synthetic construct
  source 1..20: mol_type = other DNA
ctgcttacagggggcattgt

SEQ ID NO: 39820 - DNA, 20 bp, synthetic construct
  source 1..20: mol_type = other DNA
tctgcttacagggggcattg

SEQ ID NO: 39821 - DNA, 20 bp, synthetic construct
  source 1..20: mol_type = other DNA
atctgcttacagggggcatt

SEQ ID NO: 39822 - DNA, 20 bp, synthetic construct
  source 1..20: mol_type = other DNA
gatctgcttacagggggcat

SEQ ID NO: 39823 - DNA, 20 bp, synthetic construct
  source 1..20: mol_type = other DNA
tgggatctgcttacaggggg

SEQ ID NO: 39824 - DNA, 20 bp, synthetic construct
  source 1..20: mol_type = other DNA
ctgggatctgcttacagggg

SEQ ID NO: 39825 - DNA, 20 bp, synthetic construct
  source 1..20: mol_type = other DNA
tctgggatctgcttacaggg

SEQ ID NO: 39826 - DNA, 20 bp, synthetic construct
  source 1..20: mol_type = other DNA
gtctgggatctgcttacagg

SEQ ID NO: 39827 - DNA, 20 bp, synthetic construct
  source 1..20: mol_type = other DNA
tgtctgggatctgcttacag

SEQ ID NO: 39828 - DNA, 20 bp, synthetic construct
  source 1..20: mol_type = other DNA
ttgtctgggatctgcttaca

SEQ ID NO: 39829 - DNA, 20 bp, synthetic construct
  source 1..20: mol_type = other DNA
cttgtctgggatctgcttac

SEQ ID NO: 39830 - DNA, 20 bp, synthetic construct
  source 1..20: mol_type = other DNA
tcttgtctgggatctgctta

SEQ ID NO: 39831 - DNA, 20 bp, synthetic construct
  source 1..20: mol_type = other DNA
ctcttgtctgggatctgctt

SEQ ID NO: 39832 - DNA, 20 bp, synthetic construct
  source 1..20: mol_type = other DNA
actcttgtctgggatctgct

SEQ ID NO: 39833 - DNA, 20 bp, synthetic construct
  source 1..20: mol_type = other DNA
aactcttgtctgggatctgc

SEQ ID NO: 39834 - DNA, 20 bp, synthetic construct
  source 1..20: mol_type = other DNA
caactcttgtctgggatctg

SEQ ID NO: 39835 - DNA, 20 bp, synthetic construct
  source 1..20: mol_type = other DNA
gcaactcttgtctgggatct

SEQ ID NO: 39836 - DNA, 20 bp, synthetic construct
  source 1..20: mol_type = other DNA
tgcaactcttgtctgggatc

SEQ ID NO: 39837 - DNA, 20 bp, synthetic construct
  source 1..20: mol_type = other DNA
atgcaactcttgtctgggat

SEQ ID NO: 39838 - DNA, 20 bp, synthetic construct
  source 1..20: mol_type = other DNA
gatgcaactcttgtctggga

SEQ ID NO: 39839 - DNA, 20 bp, synthetic construct
  source 1..20: mol_type = other DNA
tgatgcaactcttgtctggg

SEQ ID NO: 39840 - DNA, 20 bp, synthetic construct
  source 1..20: mol_type = other DNA
gtgatgcaactcttgtctgg

SEQ ID NO: 39841 - DNA, 20 bp, synthetic construct
  source 1..20: mol_type = other DNA
ggtgatgcaactcttgtctg

SEQ ID NO: 39842 - DNA, 20 bp, synthetic construct
  source 1..20: mol_type = other DNA
aggtgatgcaactcttgtct

SEQ ID NO: 39843 - DNA, 20 bp, synthetic construct
  source 1..20: mol_type = other DNA
gaggtgatgcaactcttgtc

SEQ ID NO: 39844 - DNA, 20 bp, synthetic construct
  source 1..20: mol_type = other DNA
cgaggtgatgcaactcttgt

SEQ ID NO: 39845 - DNA, 20 bp, synthetic construct
  source 1..20: mol_type = other DNA
ccgaggtgatgcaactcttg

SEQ ID NO: 39846 - DNA, 20 bp, synthetic construct
  source 1..20: mol_type = other DNA
accgaggtgatgcaactctt

SEQ ID NO: 39847 - DNA, 20 bp, synthetic construct
  source 1..20: mol_type = other DNA
caccgaggtgatgcaactct

SEQ ID NO: 39848 - DNA, 20 bp, synthetic construct
  source 1..20: mol_type = other DNA
tcaccgaggtgatgcaactc

SEQ ID NO: 39849 - DNA, 20 bp, synthetic construct
  source 1..20: mol_type = other DNA
atcaccgaggtgatgcaact

SEQ ID NO: 39850 - DNA, 20 bp, synthetic construct
  source 1..20: mol_type = other DNA
gatcaccgaggtgatgcaac

SEQ ID NO: 39851 - DNA, 20 bp, synthetic construct
  source 1..20: mol_type = other DNA
tgatcaccgaggtgatgcaa

SEQ ID NO: 39852 - DNA, 20 bp, synthetic construct
  source 1..20: mol_type = other DNA
ctgatcaccgaggtgatgca

SEQ ID NO: 39853 - DNA, 20 bp, synthetic construct
  source 1..20: mol_type = other DNA
actgatcaccgaggtgatgc

SEQ ID NO: 39854 - DNA, 20 bp, synthetic construct
  source 1..20: mol_type = other DNA
cactgatcaccgaggtgatg

SEQ ID NO: 39855 - DNA, 20 bp, synthetic construct
  source 1..20: mol_type = other DNA
gcactgatcaccgaggtgat

SEQ ID NO: 39856 - DNA, 20 bp, synthetic construct
  source 1..20: mol_type = other DNA
tgcactgatcaccgaggtga

SEQ ID NO: 39857 - DNA, 20 bp, synthetic construct
  source 1..20: mol_type = other DNA
ctgcactgatcaccgaggtg

SEQ ID NO: 39858 - DNA, 20 bp, synthetic construct
  source 1..20: mol_type = other DNA
tctgcactgatcaccgaggt

SEQ ID NO: 39859 - DNA, 20 bp, synthetic construct
  source 1..20: mol_type = other DNA
ctctgcactgatcaccgagg

SEQ ID NO: 39860 - DNA, 20 bp, synthetic construct
  source 1..20: mol_type = other DNA
tctctgcactgatcaccgag

SEQ ID NO: 39861 - DNA, 20 bp, synthetic construct
  source 1..20: mol_type = other DNA
atctctgcactgatcaccga

SEQ ID NO: 39862 - DNA, 20 bp, synthetic construct
  source 1..20: mol_type = other DNA
tatctctgcactgatcaccg

SEQ ID NO: 39863 - DNA, 20 bp, synthetic construct
  source 1..20: mol_type = other DNA
gtatctctgcactgatcacc

SEQ ID NO: 39864 - DNA, 20 bp, synthetic construct
  source 1..20: mol_type = other DNA
cgtatctctgcactgatcac

SEQ ID NO: 39865 - DNA, 20 bp, synthetic construct
  source 1..20: mol_type = other DNA
acgtatctctgcactgatca

SEQ ID NO: 39866 - DNA, 20 bp, synthetic construct
  source 1..20: mol_type = other DNA
gacgtatctctgcactgatc

SEQ ID NO: 39867 - DNA, 20 bp, synthetic construct
  source 1..20: mol_type = other DNA
tgacgtatctctgcactgat

SEQ ID NO: 39868 - DNA, 20 bp, synthetic construct
  source 1..20: mol_type = other DNA
gtgacgtatctctgcactga

SEQ ID NO: 39869 - DNA, 20 bp, synthetic construct
  source 1..20: mol_type = other DNA
tgtgacgtatctctgcactg

SEQ ID NO: 39870 - DNA, 20 bp, synthetic construct
  source 1..20: mol_type = other DNA
ttgtgacgtatctctgcact

SEQ ID NO: 39871 - DNA, 20 bp, synthetic construct
  source 1..20: mol_type = other DNA
attgtgacgtatctctgcac

SEQ ID NO: 39872 - DNA, 20 bp, synthetic construct
  source 1..20: mol_type = other DNA
cattgtgacgtatctctgca

SEQ ID NO: 39873 - DNA, 20 bp, synthetic construct
  source 1..20: mol_type = other DNA
gcattgtgacgtatctctgc

SEQ ID NO: 39874 - DNA, 20 bp, synthetic construct
  source 1..20: mol_type = other DNA
ggcattgtgacgtatctctg

SEQ ID NO: 39875 - DNA, 20 bp, synthetic construct
  source 1..20: mol_type = other DNA
gggcattgtgacgtatctct

SEQ ID NO: 39876 - DNA, 20 bp, synthetic construct
  source 1..20: mol_type = other DNA
ggggcattgtgacgtatctc

SEQ ID NO: 39877 - DNA, 20 bp, synthetic construct
  source 1..20: mol_type = other DNA
aggggcattgtgacgtatct

SEQ ID NO: 39878 - DNA, 20 bp, synthetic construct
  source 1..20: mol_type = other DNA
caggggcattgtgacgtatc

SEQ ID NO: 39879 - DNA, 20 bp, synthetic construct
  source 1..20: mol_type = other DNA
acaggggcattgtgacgtat

SEQ ID NO: 39880 - DNA, 20 bp, synthetic construct
  source 1..20: mol_type = other DNA
tacaggggcattgtgacgta

SEQ ID NO: 39881 - DNA, 20 bp, synthetic construct
  source 1..20: mol_type = other DNA
ctacaggggcattgtgacgt

SEQ ID NO: 39882 - DNA, 20 bp, synthetic construct
  source 1..20: mol_type = other DNA
cctacaggggcattgtgacg

SEQ ID NO: 39883 - DNA, 20 bp, synthetic construct
  source 1..20: mol_type = other DNA
tatgtaactcttgtctaggc

SEQ ID NO: 39884 - DNA, 20 bp, synthetic construct
  source 1..20: mol_type = other DNA
ttatgtaactcttgtctagg

SEQ ID NO: 39885 - DNA, 20 bp, synthetic construct
  source 1..20: mol_type = other DNA
gttatgtaactcttgtctag

SEQ ID NO: 39886 - DNA, 20 bp, synthetic construct
  source 1..20: mol_type = other DNA
ggttatgtaactcttgtcta

SEQ ID NO: 39887 - DNA, 20 bp, synthetic construct
  source 1..20: mol_type = other DNA
gggttatgtaactcttgtct

SEQ ID NO: 39888 - DNA, 20 bp, synthetic construct
  source 1..20: mol_type = other DNA
tgggttatgtaactcttgtc

SEQ ID NO: 39889 - DNA, 20 bp, synthetic construct
  source 1..20: mol_type = other DNA
ctgggttatgtaactcttgt

SEQ ID NO: 39890 - DNA, 20 bp, synthetic construct
  source 1..20: mol_type = other DNA
cctgggttatgtaactcttg

SEQ ID NO: 39891 - DNA, 20 bp, synthetic construct
  source 1..20: mol_type = other DNA
acctgggttatgtaactctt

SEQ ID NO: 39892 - DNA, 20 bp, synthetic construct
  source 1..20: mol_type = other DNA
cacctgggttatgtaactct

SEQ ID NO: 39893 - DNA, 20 bp, synthetic construct
  source 1..20: mol_type = other DNA
tcacctgggttatgtaactc

SEQ ID NO: 39894 - DNA, 20 bp, synthetic construct
  source 1..20: mol_type = other DNA
atcacctgggttatgtaact

SEQ ID NO: 39895 - DNA, 20 bp, synthetic construct
  source 1..20: mol_type = other DNA
gatcacctgggttatgtaac

SEQ ID NO: 39896 - DNA, 20 bp, synthetic construct
  source 1..20: mol_type = other DNA
ggatcacctgggttatgtaa

SEQ ID NO: 39897 - DNA, 20 bp, synthetic construct
  source 1..20: mol_type = other DNA
cggatcacctgggttatgta

SEQ ID NO: 39898 - DNA, 20 bp, synthetic construct
  source 1..20: mol_type = other DNA
acggatcacctgggttatgt

SEQ ID NO: 39899 - DNA, 20 bp, synthetic construct
  source 1..20: mol_type = other DNA
tacggatcacctgggttatg

SEQ ID NO: 39900 - DNA, 20 bp, synthetic construct
  source 1..20: mol_type = other DNA
gtacggatcacctgggttat

SEQ ID NO: 39901 - DNA, 20 bp, synthetic construct
  source 1..20: mol_type = other DNA
tgtacggatcacctgggtta

SEQ ID NO: 39902 - DNA, 20 bp, synthetic construct
  source 1..20: mol_type = other DNA
ctgtacggatcacctgggtt

SEQ ID NO: 39903 - DNA, 20 bp, synthetic construct
  source 1..20: mol_type = other DNA
tctgtacggatcacctgggt

SEQ ID NO: 39904 - DNA, 20 bp, synthetic construct
  source 1..20: mol_type = other DNA
ctctgtacggatcacctggg

SEQ ID NO: 39905 - DNA, 20 bp, synthetic construct
  source 1..20: mol_type = other DNA
actctgtacggatcacctgg

SEQ ID NO: 39906 - DNA, 20 bp, synthetic construct
  source 1..20: mol_type = other DNA
cactctgtacggatcacctg

SEQ ID NO: 39907 - DNA, 20 bp, synthetic construct
  source 1..20: mol_type = other DNA
tcactctgtacggatcacct

SEQ ID NO: 39908 - DNA, 20 bp, synthetic construct
  source 1..20: mol_type = other DNA
atcactctgtacggatcacc

SEQ ID NO: 39909 - DNA, 20 bp, synthetic construct
  source 1..20: mol_type = other DNA
catcactctgtacggatcac

SEQ ID NO: 39910 - DNA, 20 bp, synthetic construct
  source 1..20: mol_type = other DNA
acatcactctgtacggatca

SEQ ID NO: 39911 - DNA, 20 bp, synthetic construct
  source 1..20: mol_type = other DNA
gacatcactctgtacggatc

SEQ ID NO: 39912 - DNA, 20 bp, synthetic construct
  source 1..20: mol_type = other DNA
tgacatcactctgtacggat

SEQ ID NO: 39913 - DNA, 20 bp, synthetic construct
  source 1..20: mol_type = other DNA
gtgacatcactctgtacgga

SEQ ID NO: 39914 - DNA, 20 bp, synthetic construct
  source 1..20: mol_type = other DNA
tgtgacatcactctgtacgg

SEQ ID NO: 39915 - DNA, 20 bp, synthetic construct
  source 1..20: mol_type = other DNA
ttgtgacatcactctgtacg

SEQ ID NO: 39916 - DNA, 20 bp, synthetic construct
  source 1..20: mol_type = other DNA
gttgtgacatcactctgtac

SEQ ID NO: 39917 - DNA, 20 bp, synthetic construct
  source 1..20: mol_type = other DNA
cgttgtgacatcactctgta

SEQ ID NO: 39918 - DNA, 20 bp, synthetic construct
  source 1..20: mol_type = other DNA
gcgttgtgacatcactctgt

SEQ ID NO: 39919 - DNA, 20 bp, synthetic construct
  source 1..20: mol_type = other DNA
ggcgttgtgacatcactctg

SEQ ID NO: 39920 - DNA, 20 bp, synthetic construct
  source 1..20: mol_type = other DNA
gggcgttgtgacatcactct

SEQ ID NO: 39921 - DNA, 20 bp, synthetic construct
  source 1..20: mol_type = other DNA
agggcgttgtgacatcactc

SEQ ID NO: 39922 - DNA, 20 bp, synthetic construct
  source 1..20: mol_type = other DNA
gagggcgttgtgacatcact

SEQ ID NO: 39923 - DNA, 20 bp, synthetic construct
  source 1..20: mol_type = other DNA
agagggcgttgtgacatcac

SEQ ID NO: 39924 - DNA, 20 bp, synthetic construct
  source 1..20: mol_type = other DNA
cagagggcgttgtgacatca

SEQ ID NO: 39925 - DNA, 20 bp, synthetic construct
  source 1..20: mol_type = other DNA
acagagggcgttgtgacatc

SEQ ID NO: 39926 - DNA, 20 bp, synthetic construct
  source 1..20: mol_type = other DNA
tacagagggcgttgtgacat

SEQ ID NO: 39927 - DNA, 20 bp, synthetic construct
  source 1..20: mol_type = other DNA
ctacagagggcgttgtgaca

SEQ ID NO: 39928 - DNA, 20 bp, synthetic construct
  source 1..20: mol_type = other DNA
cctacagagggcgttgtgac

SEQ ID NO: 39929 - DNA, 20 bp, synthetic construct
  source 1..20: mol_type = other DNA
gcctacagagggcgttgtga

SEQ ID NO: 39930 - DNA, 20 bp, synthetic construct
  source 1..20: mol_type = other DNA
tgcctacagagggcgttgtg

SEQ ID NO: 39931 - DNA, 20 bp, synthetic construct
  source 1..20: mol_type = other DNA
tctgcctacagagggcgttg

SEQ ID NO: 39932 - DNA, 20 bp, synthetic construct
  source 1..20: mol_type = other DNA
tagtctctgcctacagaggg

SEQ ID NO: 39933 - DNA, 20 bp, synthetic construct
  source 1..20: mol_type = other DNA
ctagtctctgcctacagagg

SEQ ID NO: 39934 - DNA, 20 bp, synthetic construct
  source 1..20: mol_type = other DNA
tctagtctctgcctacagag

SEQ ID NO: 39935 - DNA, 20 bp, synthetic construct
  source 1..20: mol_type = other DNA
ttctagtctctgcctacaga

SEQ ID NO: 39936 - DNA, 20 bp, synthetic construct
  source 1..20: mol_type = other DNA
tttctagtctctgcctacag

SEQ ID NO: 39937 - DNA, 20 bp, synthetic construct
  source 1..20: mol_type = other DNA
ttttctagtctctgcctaca

SEQ ID NO: 39938 - DNA, 20 bp, synthetic construct
  source 1..20: mol_type = other DNA
cttttctagtctctgcctac

SEQ ID NO: 39939 - DNA, 20 bp, synthetic construct
  source 1..20: mol_type = other DNA
tcttttctagtctctgccta

SEQ ID NO: 39940 - DNA, 20 bp, synthetic construct
  source 1..20: mol_type = other DNA
ctcttttctagtctctgcct

SEQ ID NO: 39941 - DNA, 20 bp, synthetic construct
  source 1..20: mol_type = other DNA
actcttttctagtctctgcc

SEQ ID NO: 39942 - DNA, 20 bp, synthetic construct
  source 1..20: mol_type = other DNA
aactcttttctagtctctgc

SEQ ID NO: 39943 - DNA, 20 bp, synthetic construct
  source 1..20: mol_type = other DNA
taactcttttctagtctctg

SEQ ID NO: 39944 - DNA, 20 bp, synthetic construct
  source 1..20: mol_type = other DNA
gtaactcttttctagtctct

SEQ ID NO: 39945 - DNA, 20 bp, synthetic construct
  source 1..20: mol_type = other DNA
tgtaactcttttctagtctc

SEQ ID NO: 39946 - DNA, 20 bp, synthetic construct
  source 1..20: mol_type = other DNA
atgtaactcttttctagtct

SEQ ID NO: 39947 - DNA, 20 bp, synthetic construct
  source 1..20: mol_type = other DNA
aatgtaactcttttctagtc

SEQ ID NO: 39948 - DNA, 20 bp, synthetic construct
  source 1..20: mol_type = other DNA
ggtaatgtaactcttttcta

SEQ ID NO: 39949 - DNA, 20 bp, synthetic construct
  source 1..20: mol_type = other DNA
aggtaatgtaactcttttct

SEQ ID NO: 39950 - DNA, 20 bp, synthetic construct
  source 1..20: mol_type = other DNA
caggtaatgtaactcttttc

SEQ ID NO: 39951 - DNA, 20 bp, synthetic construct
  source 1..20: mol_type = other DNA
ccaggtaatgtaactctttt

SEQ ID NO: 39952 - DNA, 20 bp, synthetic construct
  source 1..20: mol_type = other DNA
cccaggtaatgtaactcttt

SEQ ID NO: 39953 - DNA, 20 bp, synthetic construct
  source 1..20: mol_type = other DNA
acccaggtaatgtaactctt

SEQ ID NO: 39954 - DNA, 20 bp, synthetic construct
  source 1..20: mol_type = other DNA
cacccaggtaatgtaactct

SEQ ID NO: 39955 - DNA, 20 bp, synthetic construct
  source 1..20: mol_type = other DNA
tcacccaggtaatgtaactc

SEQ ID NO: 39956 - DNA, 20 bp, synthetic construct
  source 1..20: mol_type = other DNA
atcacccaggtaatgtaact

SEQ ID NO: 39957 - DNA, 20 bp, synthetic construct
  source 1..20: mol_type = other DNA
gatcacccaggtaatgtaac

SEQ ID NO: 39958 - DNA, 20 bp, synthetic construct
  source 1..20: mol_type = other DNA
tgatcacccaggtaatgtaa

SEQ ID NO: 39959 - DNA, 20 bp, synthetic construct
  source 1..20: mol_type = other DNA
ctgatcacccaggtaatgta

SEQ ID NO: 39960 - DNA, 20 bp, synthetic construct
  source 1..20: mol_type = other DNA
actgatcacccaggtaatgt

SEQ ID NO: 39961 - DNA, 20 bp, synthetic construct
  source 1..20: mol_type = other DNA
cactgatcacccaggtaatg

SEQ ID NO: 39962 - DNA, 20 bp, synthetic construct
  source 1..20: mol_type = other DNA
gcactgatcacccaggtaat

SEQ ID NO: 39963 - DNA, 20 bp, synthetic construct
  source 1..20: mol_type = other DNA
tgcactgatcacccaggtaa

SEQ ID NO: 39964 - DNA, 20 bp, synthetic construct
  source 1..20: mol_type = other DNA
ctgcactgatcacccaggta

SEQ ID NO: 39965 - DNA, 20 bp, synthetic construct
  source 1..20: mol_type = other DNA
ctacagggggcattgtgaca

SEQ ID NO: 39966 - DNA, 20 bp, synthetic construct
  source 1..20: mol_type = other DNA
cctacagggggcattgtgac

SEQ ID NO: 39967 - DNA, 20 bp, synthetic construct
  source 1..20: mol_type = other DNA
tgcctacagggggcattgtg

SEQ ID NO: 39968 - DNA, 20 bp, synthetic construct
  source 1..20: mol_type = other DNA
tctgcctacagggggcattg

SEQ ID NO: 39969 - DNA, 20 bp, synthetic construct
  source 1..20: mol_type = other DNA
tatgctctgcctacaggggg

SEQ ID NO: 39970 - DNA, 20 bp, synthetic construct
  source 1..20: mol_type = other DNA
ctatgctctgcctacagggg

SEQ ID NO: 39971 - DNA, 20 bp, synthetic construct
  source 1..20: mol_type = other DNA
tctatgctctgcctacaggg

SEQ ID NO: 39972 - DNA, 20 bp, synthetic construct
  source 1..20: mol_type = other DNA
ctctatgctctgcctacagg

SEQ ID NO: 39973 - DNA, 20 bp, synthetic construct
  source 1..20: mol_type = other DNA
tctctatgctctgcctacag

SEQ ID NO: 39974 - DNA, 20 bp, synthetic construct
  source 1..20: mol_type = other DNA
ttctctatgctctgcctaca

SEQ ID NO: 39975 - DNA, 20 bp, synthetic construct
  source 1..20: mol_type = other DNA
cttctctatgctctgcctac

SEQ ID NO: 39976 - DNA, 20 bp, synthetic construct
  source 1..20: mol_type = other DNA
tcttctctatgctctgccta

SEQ ID NO: 39977 - DNA, 20 bp, synthetic construct
  source 1..20: mol_type = other DNA
actcttctctatgctctgcc

SEQ ID NO: 39978 - DNA, 20 bp, synthetic construct
  source 1..20: mol_type = other DNA
aactcttctctatgctctgc

SEQ ID NO: 39979 - DNA, 20 bp, synthetic construct
  source 1..20: mol_type = other DNA
caactcttctctatgctctg

SEQ ID NO: 39980 - DNA, 20 bp, synthetic construct
  source 1..20: mol_type = other DNA
gcaactcttctctatgctct

SEQ ID NO: 39981 - DNA, 20 bp, synthetic construct
  source 1..20: mol_type = other DNA
tgcaactcttctctatgctc

SEQ ID NO: 39982 - DNA, 20 bp, synthetic construct
  source 1..20: mol_type = other DNA
atgcaactcttctctatgct

SEQ ID NO: 39983 - DNA, 20 bp, synthetic construct
  source 1..20: mol_type = other DNA
gatgcaactcttctctatgc

SEQ ID NO: 39984 - DNA, 20 bp, synthetic construct
  source 1..20: mol_type = other DNA
tgatgcaactcttctctatg

SEQ ID NO: 39985 - DNA, 20 bp, synthetic construct
  source 1..20: mol_type = other DNA
gtgatgcaactcttctctat

SEQ ID NO: 39986 - DNA, 20 bp, synthetic construct
  source 1..20: mol_type = other DNA
ggtgatgcaactcttctcta

SEQ ID NO: 39987 - DNA, 20 bp, synthetic construct
  source 1..20: mol_type = other DNA
aggtgatgcaactcttctct

SEQ ID NO: 39988 - DNA, 20 bp, synthetic construct
  source 1..20: mol_type = other DNA
caggtgatgcaactcttctc

SEQ ID NO: 39989 - DNA, 20 bp, synthetic construct
  source 1..20: mol_type = other DNA
ccaggtgatgcaactcttct

SEQ ID NO: 39990 - DNA, 20 bp, synthetic construct
  source 1..20: mol_type = other DNA
cccaggtgatgcaactcttc

SEQ ID NO: 39991 - DNA, 20 bp, synthetic construct
  source 1..20: mol_type = other DNA
acccaggtgatgcaactctt

SEQ ID NO: 39992 - DNA, 20 bp, synthetic construct
  source 1..20: mol_type = other DNA
cacccaggtgatgcaactct

SEQ ID NO: 39993 - DNA, 20 bp, synthetic construct
  source 1..20: mol_type = other DNA
tcacccaggtgatgcaactc

SEQ ID NO: 39994 - DNA, 20 bp, synthetic construct
  source 1..20: mol_type = other DNA
atcacccaggtgatgcaact

SEQ ID NO: 39995 - DNA, 20 bp, synthetic construct
  source 1..20: mol_type = other DNA
gatcacccaggtgatgcaac

SEQ ID NO: 39996 - DNA, 20 bp, synthetic construct
  source 1..20: mol_type = other DNA
tgatcacccaggtgatgcaa

SEQ ID NO: 39997 - DNA, 20 bp, synthetic construct
  source 1..20: mol_type = other DNA
ctgatcacccaggtgatgca

SEQ ID NO: 39998 - DNA, 20 bp, synthetic construct
  source 1..20: mol_type = other DNA
actgatcacccaggtgatgc

SEQ ID NO: 39999 - DNA, 20 bp, synthetic construct
  source 1..20: mol_type = other DNA
tacactgatcacccaggtga

SEQ ID NO: 40000 - DNA, 20 bp, synthetic construct
  source 1..20: mol_type = other DNA
ctacactgatcacccaggtg

SEQ ID NO: 40001 - DNA, 20 bp, synthetic construct
  source 1..20: mol_type = other DNA
tctacactgatcacccaggt

SEQ ID NO: 40002 - DNA, 20 bp, synthetic construct
  source 1..20: mol_type = other DNA
ctctacactgatcacccagg

SEQ ID NO: 40003 - DNA, 20 bp, synthetic construct
  source 1..20: mol_type = other DNA
tctctacactgatcacccag

SEQ ID NO: 40004 - DNA, 20 bp, synthetic construct
  source 1..20: mol_type = other DNA
atctctacactgatcaccca

SEQ ID NO: 40005 - DNA, 20 bp, synthetic construct
  source 1..20: mol_type = other DNA
tatctctacactgatcaccc

SEQ ID NO: 40006 - DNA, 20 bp, synthetic construct
  source 1..20: mol_type = other DNA
gacatatctctacactgatc

SEQ ID NO: 40007 - DNA, 20 bp, synthetic construct
  source 1..20: mol_type = other DNA
tgacatatctctacactgat

SEQ ID NO: 40008 - DNA, 20 bp, synthetic construct
  source 1..20: mol_type = other DNA
gtgacatatctctacactga

SEQ ID NO: 40009 - DNA, 20 bp, synthetic construct
  source 1..20: mol_type = other DNA
tgtgacatatctctacactg

SEQ ID NO: 40010 - DNA, 20 bp, synthetic construct
  source 1..20: mol_type = other DNA
ttgtgacatatctctacact

SEQ ID NO: 40011 - DNA, 20 bp, synthetic construct
  source 1..20: mol_type = other DNA
attgtgacatatctctacac

SEQ ID NO: 40012 - DNA, 20 bp, synthetic construct
  source 1..20: mol_type = other DNA
cattgtgacatatctctaca

SEQ ID NO: 40013 - DNA, 20 bp, synthetic construct
  source 1..20: mol_type = other DNA
acattgtgacatatctctac

SEQ ID NO: 40014 - DNA, 20 bp, synthetic construct
  source 1..20: mol_type = other DNA
gacattgtgacatatctcta

SEQ ID NO: 40015 - DNA, 20 bp, synthetic construct
  source 1..20: mol_type = other DNA
ggggacattgtgacatatct

SEQ ID NO: 40016 - DNA, 20 bp, synthetic construct
  source 1..20: mol_type = other DNA
aggggacattgtgacatatc

SEQ ID NO: 40017 - DNA, 20 bp, synthetic construct
  source 1..20: mol_type = other DNA
caggggacattgtgacatat

SEQ ID NO: 40018 - DNA, 20 bp, synthetic construct
  source 1..20: mol_type = other DNA
tctaggatctgcctacaggg

SEQ ID NO: 40019 - DNA, 20 bp, synthetic construct
  source 1..20: mol_type = other DNA
gtctaggatctgcctacagg

SEQ ID NO: 40020 - DNA, 20 bp, synthetic construct
  source 1..20: mol_type = other DNA
tgtctaggatctgcctacag

SEQ ID NO: 40021 - DNA, 20 bp, synthetic construct
  source 1..20: mol_type = other DNA
ttgtctaggatctgcctaca

SEQ ID NO: 40022 - DNA, 20 bp, synthetic construct
  source 1..20: mol_type = other DNA
cttgtctaggatctgcctac

SEQ ID NO: 40023 - DNA, 20 bp, synthetic construct
  source 1..20: mol_type = other DNA
tcttgtctaggatctgccta

SEQ ID NO: 40024 - DNA, 20 bp, synthetic construct
  source 1..20: mol_type = other DNA
ctcttgtctaggatctgcct

SEQ ID NO: 40025 - DNA, 20 bp, synthetic construct
  source 1..20: mol_type = other DNA
actcttgtctaggatctgcc

SEQ ID NO: 40026 - DNA, 20 bp, synthetic construct
  source 1..20: mol_type = other DNA
aactcttgtctaggatctgc

SEQ ID NO: 40027 - DNA, 20 bp, synthetic construct
  source 1..20: mol_type = other DNA
gcactgatcacctaagtgat

SEQ ID NO: 40028 - DNA, 20 bp, synthetic construct
  source 1..20: mol_type = other DNA
tgcactgatcacctaagtga

SEQ ID NO: 40029 - DNA, 20 bp, synthetic construct
  source 1..20: mol_type = other DNA
ctgcactgatcacctaagtg

SEQ ID NO: 40030 - DNA, 20 bp, synthetic construct
  source 1..20: mol_type = other DNA
tctgcactgatcacctaagt

SEQ ID NO: 40031 - DNA, 20 bp, synthetic construct
  source 1..20: mol_type = other DNA
ctctgcactgatcacctaag

SEQ ID NO: 40032 - DNA, 20 bp, synthetic construct
  source 1..20: mol_type = other DNA
tctctgcactgatcacctaa

SEQ ID NO: 40033 - DNA, 20 bp, synthetic construct
  source 1..20: mol_type = other DNA
atctctgcactgatcaccta

SEQ ID NO: 40034 - DNA, 20 bp, synthetic construct
  source 1..20: mol_type = other DNA
gtctaggctttggcctacag

SEQ ID NO: 40035 - DNA, 20 bp, synthetic construct
  source 1..20: mol_type = other DNA
tgtctaggctttggcctaca

SEQ ID NO: 40036 - DNA, 20 bp, synthetic construct
  source 1..20: mol_type = other DNA
ttgtctaggctttggcctac

SEQ ID NO: 40037 - DNA, 20 bp, synthetic construct
  source 1..20: mol_type = other DNA
attgtctaggctttggccta

SEQ ID NO: 40038 - DNA, 20 bp, synthetic construct
  source 1..20: mol_type = other DNA
tattgtctaggctttggcct

SEQ ID NO: 40039 - DNA, 20 bp, synthetic construct
  source 1..20: mol_type = other DNA
ctattgtctaggctttggcc

SEQ ID NO: 40040 - DNA, 20 bp, synthetic construct
  source 1..20: mol_type = other DNA
actattgtctaggctttggc

SEQ ID NO: 40041 - DNA, 20 bp, synthetic construct
  source 1..20: mol_type = other DNA
aactattgtctaggctttgg

SEQ ID NO: 40042 - DNA, 20 bp, synthetic construct
  source 1..20: mol_type = other DNA
taactattgtctaggctttg

SEQ ID NO: 40043 - DNA, 20 bp, synthetic construct
  source 1..20: mol_type = other DNA
gtaactattgtctaggcttt

SEQ ID NO: 40044 - DNA, 20 bp, synthetic construct
  source 1..20: mol_type = other DNA
tgtaactattgtctaggctt

SEQ ID NO: 40045 - DNA, 20 bp, synthetic construct
  source 1..20: mol_type = other DNA
atgtaactattgtctaggct

SEQ ID NO: 40046 - DNA, 20 bp, synthetic construct
  source 1..20: mol_type = other DNA
gatgtaactattgtctaggc

SEQ ID NO: 40047 - DNA, 20 bp, synthetic construct
  source 1..20: mol_type = other DNA
tgatgtaactattgtctagg

SEQ ID NO: 40048 - DNA, 20 bp, synthetic construct
  source 1..20: mol_type = other DNA
gtgatgtaactattgtctag

SEQ ID NO: 40049 - DNA, 20 bp, synthetic construct
  source 1..20: mol_type = other DNA
agtgatgtaactattgtcta

SEQ ID NO: 40050 - DNA, 20 bp, synthetic construct
  source 1..20: mol_type = other DNA
aagtgatgtaactattgtct

SEQ ID NO: 40051 - DNA, 20 bp, synthetic construct
  source 1..20: mol_type = other DNA
ccaagtgatgtaactattgt

SEQ ID NO: 40052 - DNA, 20 bp, synthetic construct
  source 1..20: mol_type = other DNA
cccaagtgatgtaactattg

SEQ ID NO: 40053 - DNA, 20 bp, synthetic construct
  source 1..20: mol_type = other DNA
acccaagtgatgtaactatt

SEQ ID NO: 40054 - DNA, 20 bp, synthetic construct
  source 1..20: mol_type = other DNA
cacccaagtgatgtaactat

SEQ ID NO: 40055 - DNA, 20 bp, synthetic construct
  source 1..20: mol_type = other DNA
tcacccaagtgatgtaacta

SEQ ID NO: 40056 - DNA, 20 bp, synthetic construct
  source 1..20: mol_type = other DNA
atcacccaagtgatgtaact

SEQ ID NO: 40057 - DNA, 20 bp, synthetic construct
  source 1..20: mol_type = other DNA
gatcacccaagtgatgtaac

SEQ ID NO: 40058 - DNA, 20 bp, synthetic construct
  source 1..20: mol_type = other DNA
tgatcacccaagtgatgtaa

SEQ ID NO: 40059 - DNA, 20 bp, synthetic construct
  source 1..20: mol_type = other DNA
ctgatcacccaagtgatgta

SEQ ID NO: 40060 - DNA, 20 bp, synthetic construct
  source 1..20: mol_type = other DNA
actgatcacccaagtgatgt

SEQ ID NO: 40061 - DNA, 20 bp, synthetic construct
  source 1..20: mol_type = other DNA
cactgatcacccaagtgatg

SEQ ID NO: 40062 - DNA, 20 bp, synthetic construct
  source 1..20: mol_type = other DNA
ccactgatcacccaagtgat

SEQ ID NO: 40063 - DNA, 20 bp, synthetic construct
  source 1..20: mol_type = other DNA
gccactgatcacccaagtga

SEQ ID NO: 40064 - DNA, 20 bp, synthetic construct
  source 1..20: mol_type = other DNA
cgccactgatcacccaagtg

SEQ ID NO: 40065 - DNA, 20 bp, synthetic construct
  source 1..20: mol_type = other DNA
tcgccactgatcacccaagt

SEQ ID NO: 40066 - DNA, 20 bp, synthetic construct
  source 1..20: mol_type = other DNA
ctcgccactgatcacccaag

SEQ ID NO: 40067 - DNA, 20 bp, synthetic construct
  source 1..20: mol_type = other DNA
tctcgccactgatcacccaa

SEQ ID NO: 40068 - DNA, 20 bp, synthetic construct
  source 1..20: mol_type = other DNA
atctcgccactgatcaccca

SEQ ID NO: 40069 - DNA, 20 bp, synthetic construct
  source 1..20: mol_type = other DNA
gatctcgccactgatcaccc

SEQ ID NO: 40070 - DNA, 20 bp, synthetic construct
  source 1..20: mol_type = other DNA
agatctcgccactgatcacc

SEQ ID NO: 40071 - DNA, 20 bp, synthetic construct
  source 1..20: mol_type = other DNA
gagatctcgccactgatcac

SEQ ID NO: 40072 - DNA, 20 bp, synthetic construct
  source 1..20: mol_type = other DNA
agagatctcgccactgatca

SEQ ID NO: 40073 - DNA, 20 bp, synthetic construct
  source 1..20: mol_type = other DNA
gagagatctcgccactgatc

SEQ ID NO: 40074 - DNA, 20 bp, synthetic construct
  source 1..20: mol_type = other DNA
tgagagatctcgccactgat

SEQ ID NO: 40075 - DNA, 20 bp, synthetic construct
  source 1..20: mol_type = other DNA
gtgagagatctcgccactga

SEQ ID NO: 40076 - DNA, 20 bp, synthetic construct
  source 1..20: mol_type = other DNA
tgtgagagatctcgccactg

SEQ ID NO: 40077 - DNA, 20 bp, synthetic construct
  source 1..20: mol_type = other DNA
ttgtgagagatctcgccact

SEQ ID NO: 40078 - DNA, 20 bp, synthetic construct
  source 1..20: mol_type = other DNA
attgtgagagatctcgccac

SEQ ID NO: 40079 - DNA, 20 bp, synthetic construct
  source 1..20: mol_type = other DNA
aattgtgagagatctcgcca

SEQ ID NO: 40080 - DNA, 20 bp, synthetic construct
  source 1..20: mol_type = other DNA
gaattgtgagagatctcgcc

SEQ ID NO: 40081 - DNA, 20 bp, synthetic construct
  source 1..20: mol_type = other DNA
ggaattgtgagagatctcgc

SEQ ID NO: 40082 - DNA, 20 bp, synthetic construct
  source 1..20: mol_type = other DNA
gggaattgtgagagatctcg

SEQ ID NO: 40083 - DNA, 20 bp, synthetic construct
  source 1..20: mol_type = other DNA
ggggaattgtgagagatctc

SEQ ID NO: 40084 - DNA, 20 bp, synthetic construct
  source 1..20: mol_type = other DNA
aggggaattgtgagagatct

SEQ ID NO: 40085 - DNA, 20 bp, synthetic construct
  source 1..20: mol_type = other DNA
caggggaattgtgagagatc

SEQ ID NO: 40086 - DNA, 20 bp, synthetic construct
  source 1..20: mol_type = other DNA
acaggggaattgtgagagat

SEQ ID NO: 40087 - DNA, 20 bp, synthetic construct
  source 1..20: mol_type = other DNA
tacaggggaattgtgagaga

SEQ ID NO: 40088 - DNA, 20 bp, synthetic construct
  source 1..20: mol_type = other DNA
ctacaggggaattgtgagag

SEQ ID NO: 40089 - DNA, 20 bp, synthetic construct
  source 1..20: mol_type = other DNA
cctacaggggaattgtgaga

SEQ ID NO: 40090 - DNA, 20 bp, synthetic construct
  source 1..20: mol_type = other DNA
gcctacaggggaattgtgag

SEQ ID NO: 40091 - DNA, 20 bp, synthetic construct
  source 1..20: mol_type = other DNA
tgcctacaggggaattgtga

SEQ ID NO: 40092 - DNA, 20 bp, synthetic construct
  source 1..20: mol_type = other DNA
ctgcctacaggggaattgtg

SEQ ID NO: 40093 - DNA, 20 bp, synthetic construct
  source 1..20: mol_type = other DNA
tctgcctacaggggaattgt

SEQ ID NO: 40094 - DNA, 20 bp, synthetic construct
  source 1..20: mol_type = other DNA
ctctgcctacaggggaattg

SEQ ID NO: 40095 - DNA, 20 bp, synthetic construct
  source 1..20: mol_type = other DNA
gctctgcctacaggggaatt

SEQ ID NO: 40096 - DNA, 20 bp, synthetic construct
  source 1..20: mol_type = other DNA
agctctgcctacaggggaat

SEQ ID NO: 40097 - DNA, 20 bp, synthetic construct
  source 1..20: mol_type = other DNA
aagctctgcctacaggggaa

SEQ ID NO: 40098 - DNA, 20 bp, synthetic construct
  source 1..20: mol_type = other DNA
taagctctgcctacagggga

SEQ ID NO: 40099 - DNA, 20 bp, synthetic construct
  source 1..20: mol_type = other DNA
ataagctctgcctacagggg

SEQ ID NO: 40100 - DNA, 20 bp, synthetic construct
  source 1..20: mol_type = other DNA
tataagctctgcctacaggg

SEQ ID NO: 40101 - DNA, 20 bp, synthetic construct
  source 1..20: mol_type = other DNA
gtataagctctgcctacagg

SEQ ID NO: 40102 - DNA, 20 bp, synthetic construct
  source 1..20: mol_type = other DNA
tgtataagctctgcctacag

SEQ ID NO: 40103 - DNA, 20 bp, synthetic construct
  source 1..20: mol_type = other DNA
ttgtataagctctgcctaca

SEQ ID NO: 40104 - DNA, 20 bp, synthetic construct
  source 1..20: mol_type = other DNA
gttgtataagctctgcctac

SEQ ID NO: 40105 - DNA, 20 bp, synthetic construct
  source 1..20: mol_type = other DNA
tgttgtataagctctgccta

SEQ ID NO: 40106 - DNA, 20 bp, synthetic construct
  source 1..20: mol_type = other DNA
ctgttgtataagctctgcct

SEQ ID NO: 40107 - DNA, 20 bp, synthetic construct
  source 1..20: mol_type = other DNA
actgttgtataagctctgcc

SEQ ID NO: 40108 - DNA, 20 bp, synthetic construct
  source 1..20: mol_type = other DNA
aactgttgtataagctctgc

SEQ ID NO: 40109 - DNA, 20 bp, synthetic construct
  source 1..20: mol_type = other DNA
taactgttgtataagctctg

SEQ ID NO: 40110 - DNA, 20 bp, synthetic construct
  source 1..20: mol_type = other DNA
gtaactgttgtataagctct

SEQ ID NO: 40111 - DNA, 20 bp, synthetic construct
  source 1..20: mol_type = other DNA
tgtaactgttgtataagctc

SEQ ID NO: 40112 - DNA, 20 bp, synthetic construct
  source 1..20: mol_type = other DNA
atgtaactgttgtataagct

SEQ ID NO: 40113 - DNA, 20 bp, synthetic construct
  source 1..20: mol_type = other DNA
gatgtaactgttgtataagc

SEQ ID NO: 40114 - DNA, 20 bp, synthetic construct
  source 1..20: mol_type = other DNA
tatgggggcattgtgacata

SEQ ID NO: 40115 - DNA, 20 bp, synthetic construct
  source 1..20: mol_type = other DNA
ctatgggggcattgtgacat

SEQ ID NO: 40116 - DNA, 20 bp, synthetic construct
  source 1..20: mol_type = other DNA
cctatgggggcattgtgaca

SEQ ID NO: 40117 - DNA, 20 bp, synthetic construct
  source 1..20: mol_type = other DNA
gcctatgggggcattgtgac

SEQ ID NO: 40118 - DNA, 20 bp, synthetic construct
  source 1..20: mol_type = other DNA
tgcctatgggggcattgtga

SEQ ID NO: 40119 - DNA, 20 bp, synthetic construct
  source 1..20: mol_type = other DNA
ctgcctatgggggcattgtg

SEQ ID NO: 40120 - DNA, 20 bp, synthetic construct
  source 1..20: mol_type = other DNA
atctgcctatgggggcattg

SEQ ID NO: 40121 - DNA, 20 bp, synthetic construct
  source 1..20: mol_type = other DNA
gatctgcctatgggggcatt

SEQ ID NO: 40122 - DNA, 20 bp, synthetic construct
  source 1..20: mol_type = other DNA
cgtatttctgcactgatcac

SEQ ID NO: 40123 - DNA, 20 bp, synthetic construct
  source 1..20: mol_type = other DNA
acgtatttctgcactgatca

SEQ ID NO: 40124 - DNA, 20 bp, synthetic construct
  source 1..20: mol_type = other DNA
gacgtatttctgcactgatc

SEQ ID NO: 40125 - DNA, 20 bp, synthetic construct
  source 1..20: mol_type = other DNA
tgacgtatttctgcactgat

SEQ ID NO: 40126 - DNA, 20 bp, synthetic construct
  source 1..20: mol_type = other DNA
gtgacgtatttctgcactga

SEQ ID NO: 40127 - DNA, 20 bp, synthetic construct
  source 1..20: mol_type = other DNA
tgtgacgtatttctgcactg

SEQ ID NO: 40128 - DNA, 20 bp, synthetic construct
  source 1..20: mol_type = other DNA
ttgtgacgtatttctgcact

SEQ ID NO: 40129 - DNA, 20 bp, synthetic construct
  source 1..20: mol_type = other DNA
attgtgacgtatttctgcac

SEQ ID NO: 40130 - DNA, 20 bp, synthetic construct
  source 1..20: mol_type = other DNA
cattgtgacgtatttctgca

SEQ ID NO: 40131 - DNA, 20 bp, synthetic construct
  source 1..20: mol_type = other DNA
gcattgtgacgtatttctgc

SEQ ID NO: 40132 - DNA, 20 bp, synthetic construct
  source 1..20: mol_type = other DNA
ggcattgtgacgtatttctg

SEQ ID NO: 40133 - DNA, 20 bp, synthetic construct
  source 1..20: mol_type = other DNA
gggcattgtgacgtatttct

SEQ ID NO: 40134 - DNA, 20 bp, synthetic construct
  source 1..20: mol_type = other DNA
ggggcattgtgacgtatttc

SEQ ID NO: 40135 - DNA, 20 bp, synthetic construct
  source 1..20: mol_type = other DNA
gggggcattgtgacgtattt

SEQ ID NO: 40136 - DNA, 20 bp, synthetic construct
  source 1..20: mol_type = other DNA
agggggcattgtgacgtatt

SEQ ID NO: 40137 - DNA, 20 bp, synthetic construct
  source 1..20: mol_type = other DNA
aagggggcattgtgacgtat

SEQ ID NO: 40138 - DNA, 20 bp, synthetic construct
  source 1..20: mol_type = other DNA
taagggggcattgtgacgta

SEQ ID NO: 40139 - DNA, 20 bp, synthetic construct
  source 1..20: mol_type = other DNA
ctaagggggcattgtgacgt

SEQ ID NO: 40140 - DNA, 20 bp, synthetic construct
  source 1..20: mol_type = other DNA
cctaagggggcattgtgacg

SEQ ID NO: 40141 - DNA, 20 bp, synthetic construct
  source 1..20: mol_type = other DNA
gcctaagggggcattgtgac

SEQ ID NO: 40142 - DNA, 20 bp, synthetic construct
  source 1..20: mol_type = other DNA
tgcctaagggggcattgtga

SEQ ID NO: 40143 - DNA, 20 bp, synthetic construct
  source 1..20: mol_type = other DNA
ctgcctaagggggcattgtg

SEQ ID NO: 40144 - DNA, 20 bp, synthetic construct
  source 1..20: mol_type = other DNA
tctgcctaagggggcattgt

SEQ ID NO: 40145 - DNA, 20 bp, synthetic construct
  source 1..20: mol_type = other DNA
ctctgcctaagggggcattg

SEQ ID NO: 40146 - DNA, 20 bp, synthetic construct
  source 1..20: mol_type = other DNA
tctaggctctgcctaagggg

SEQ ID NO: 40147 - DNA, 20 bp, synthetic construct
  source 1..20: mol_type = other DNA
tgtctaggctctgcctaagg

SEQ ID NO: 40148 - DNA, 20 bp, synthetic construct
  source 1..20: mol_type = other DNA
ttgtctaggctctgcctaag

SEQ ID NO: 40149 - DNA, 20 bp, synthetic construct
  source 1..20: mol_type = other DNA
tttgtctaggctctgcctaa

SEQ ID NO: 40150 - DNA, 20 bp, synthetic construct
  source 1..20: mol_type = other DNA
ttttgtctaggctctgccta

SEQ ID NO: 40151 - DNA, 20 bp, synthetic construct
  source 1..20: mol_type = other DNA
atggggcttttgtctaggct

SEQ ID NO: 40152 - DNA, 20 bp, synthetic construct
  source 1..20: mol_type = other DNA
gatggggcttttgtctaggc

SEQ ID NO: 40153 - DNA, 20 bp, synthetic construct
  source 1..20: mol_type = other DNA
tgatggggcttttgtctagg

SEQ ID NO: 40154 - DNA, 20 bp, synthetic construct
  source 1..20: mol_type = other DNA
gtgatggggcttttgtctag

SEQ ID NO: 40155 - DNA, 20 bp, synthetic construct
  source 1..20: mol_type = other DNA
ggtgatggggcttttgtcta

SEQ ID NO: 40156 - DNA, 20 bp, synthetic construct
  source 1..20: mol_type = other DNA
aggtgatggggcttttgtct

SEQ ID NO: 40157 - DNA, 20 bp, synthetic construct
  source 1..20: mol_type = other DNA
caggtgatggggcttttgtc

SEQ ID NO: 40158 - DNA, 20 bp, synthetic construct
  source 1..20: mol_type = other DNA
ccaggtgatggggcttttgt

SEQ ID NO: 40159 - DNA, 20 bp, synthetic construct
  source 1..20: mol_type = other DNA
tccaggtgatggggcttttg

SEQ ID NO: 40160 - DNA, 20 bp, synthetic construct
  source 1..20: mol_type = other DNA
atccaggtgatggggctttt

SEQ ID NO: 40161 - DNA, 20 bp, synthetic construct
  source 1..20: mol_type = other DNA
catccaggtgatggggcttt

SEQ ID NO: 40162 - DNA, 20 bp, synthetic construct
  source 1..20: mol_type = other DNA
tcatccaggtgatggggctt

SEQ ID NO: 40163 - DNA, 20 bp, synthetic construct
  source 1..20: mol_type = other DNA
atcatccaggtgatggggct

SEQ ID NO: 40164 - DNA, 20 bp, synthetic construct
  source 1..20: mol_type = other DNA
aatcatccaggtgatggggc

SEQ ID NO: 40165 - DNA, 20 bp, synthetic construct
  source 1..20: mol_type = other DNA
taatcatccaggtgatgggg

SEQ ID NO: 40166 - DNA, 20 bp, synthetic construct
  source 1..20: mol_type = other DNA
ctaatcatccaggtgatggg

SEQ ID NO: 40167 - DNA, 20 bp, synthetic construct
  source 1..20: mol_type = other DNA
actaatcatccaggtgatgg

SEQ ID NO: 40168 - DNA, 20 bp, synthetic construct
  source 1..20: mol_type = other DNA
cactaatcatccaggtgatg

SEQ ID NO: 40169 - DNA, 20 bp, synthetic construct
  source 1..20: mol_type = other DNA
gcactaatcatccaggtgat

SEQ ID NO: 40170 - DNA, 20 bp, synthetic construct
  source 1..20: mol_type = other DNA
tgcactaatcatccaggtga

SEQ ID NO: 40171 - DNA, 20 bp, synthetic construct
  source 1..20: mol_type = other DNA
ctgcactaatcatccaggtg

SEQ ID NO: 40172 - DNA, 20 bp, synthetic construct
  source 1..20: mol_type = other DNA
tctgcactaatcatccaggt

SEQ ID NO: 40173 - DNA, 20 bp, synthetic construct
  source 1..20: mol_type = other DNA
ctctgcactaatcatccagg

SEQ ID NO: 40174 - DNA, 20 bp, synthetic construct
  source 1..20: mol_type = other DNA
actctgcactaatcatccag

SEQ ID NO: 40175 - DNA, 20 bp, synthetic construct
  source 1..20: mol_type = other DNA
aactctgcactaatcatcca

SEQ ID NO: 40176 - DNA, 20 bp, synthetic construct
  source 1..20: mol_type = other DNA
taactctgcactaatcatcc

SEQ ID NO: 40177 - DNA, 20 bp, synthetic construct
  source 1..20: mol_type = other DNA
ataactctgcactaatcatc

SEQ ID NO: 40178 - DNA, 20 bp, synthetic construct
  source 1..20: mol_type = other DNA
cataactctgcactaatcat

SEQ ID NO: 40179 - DNA, 20 bp, synthetic construct
  source 1..20: mol_type = other DNA
acataactctgcactaatca

SEQ ID NO: 40180 - DNA, 20 bp, synthetic construct
  source 1..20: mol_type = other DNA
gacataactctgcactaatc

SEQ ID NO: 40181 - DNA, 20 bp, synthetic construct
  source 1..20: mol_type = other DNA
tgacataactctgcactaat

SEQ ID NO: 40182 - DNA, 20 bp, synthetic construct
  source 1..20: mol_type = other DNA
gtgacataactctgcactaa

SEQ ID NO: 40183 - DNA, 20 bp, synthetic construct
  source 1..20: mol_type = other DNA
tgtgacataactctgcacta

SEQ ID NO: 40184 - DNA, 20 bp, synthetic construct
  source 1..20: mol_type = other DNA
tttgtgacataactctgcac

SEQ ID NO: 40185 - DNA, 20 bp, synthetic construct
  source 1..20: mol_type = other DNA
ctttgtgacataactctgca

SEQ ID NO: 40186 - DNA, 20 bp, synthetic construct
  source 1..20: mol_type = other DNA
actttgtgacataactctgc

SEQ ID NO: 40187 - DNA, 20 bp, synthetic construct
  source 1..20: mol_type = other DNA
gactttgtgacataactctg

SEQ ID NO: 40188 - DNA, 20 bp, synthetic construct
  source 1..20: mol_type = other DNA
ggactttgtgacataactct

SEQ ID NO: 40189 - DNA, 20 bp, synthetic construct
  source 1..20: mol_type = other DNA
tctctgcactgatcacccaa

SEQ ID NO: 40190 - DNA, 20 bp, synthetic construct
  source 1..20: mol_type = other DNA
tggcattgtgacatatctct

SEQ ID NO: 40191 - DNA, 20 bp, synthetic construct
  source 1..20: mol_type = other DNA
gtggcattgtgacatatctc

SEQ ID NO: 40192 - DNA, 20 bp, synthetic construct
  source 1..20: mol_type = other DNA
agtggcattgtgacatatct

SEQ ID NO: 40193 - DNA, 20 bp, synthetic construct
  source 1..20: mol_type = other DNA
cagtggcattgtgacatatc

SEQ ID NO: 40194 - DNA, 20 bp, synthetic construct
  source 1..20: mol_type = other DNA
acagtggcattgtgacatat

SEQ ID NO: 40195 - DNA, 20 bp, synthetic construct
  source 1..20: mol_type = other DNA
tacagtggcattgtgacata

SEQ ID NO: 40196 - DNA, 20 bp, synthetic construct
  source 1..20: mol_type = other DNA
ctacagtggcattgtgacat

SEQ ID NO: 40197 - DNA, 20 bp, synthetic construct
  source 1..20: mol_type = other DNA
cctacagtggcattgtgaca

SEQ ID NO: 40198 - DNA, 20 bp, synthetic construct
  source 1..20: mol_type = other DNA
gcctacagtggcattgtgac

SEQ ID NO: 40199 - DNA, 20 bp, synthetic construct
  source 1..20: mol_type = other DNA
tgcctacagtggcattgtga

SEQ ID NO: 40200 - DNA, 20 bp, synthetic construct
  source 1..20: mol_type = other DNA
ctgcctacagtggcattgtg

SEQ ID NO: 40201 - DNA, 20 bp, synthetic construct
  source 1..20: mol_type = other DNA
tctgcctacagtggcattgt

SEQ ID NO: 40202 - DNA, 20 bp, synthetic construct
  source 1..20: mol_type = other DNA
ctctgcctacagtggcattg

SEQ ID NO: 40203 - DNA, 20 bp, synthetic construct
  source 1..20: mol_type = other DNA
tctaggctctgcctacagtg

SEQ ID NO: 40204 - DNA, 20 bp, synthetic construct
  source 1..20: mol_type = other DNA
ataactcttgtctaggctct

SEQ ID NO: 40205 - DNA, 20 bp, synthetic construct
  source 1..20: mol_type = other DNA
tataactcttgtctaggctc

SEQ ID NO: 40206 - DNA, 20 bp, synthetic construct
  source 1..20: mol_type = other DNA
atataactcttgtctaggct

SEQ ID NO: 40207 - DNA, 20 bp, synthetic construct
  source 1..20: mol_type = other DNA
catataactcttgtctaggc

SEQ ID NO: 40208 - DNA, 20 bp, synthetic construct
  source 1..20: mol_type = other DNA
tcatataactcttgtctagg

SEQ ID NO: 40209 - DNA, 20 bp, synthetic construct
  source 1..20: mol_type = other DNA
gtcatataactcttgtctag

SEQ ID NO: 40210 - DNA, 20 bp, synthetic construct
  source 1..20: mol_type = other DNA
ggtcatataactcttgtcta

SEQ ID NO: 40211 - DNA, 20 bp, synthetic construct
  source 1..20: mol_type = other DNA
aggtcatataactcttgtct

SEQ ID NO: 40212 - DNA, 20 bp, synthetic construct
  source 1..20: mol_type = other DNA
taggtcatataactcttgtc

SEQ ID NO: 40213 - DNA, 20 bp, synthetic construct
  source 1..20: mol_type = other DNA
ctaggtcatataactcttgt

SEQ ID NO: 40214 - DNA, 20 bp, synthetic construct
  source 1..20: mol_type = other DNA
cctaggtcatataactcttg

SEQ ID NO: 40215 - DNA, 20 bp, synthetic construct
  source 1..20: mol_type = other DNA
acctaggtcatataactctt

SEQ ID NO: 40216 - DNA, 20 bp, synthetic construct
  source 1..20: mol_type = other DNA
cacctaggtcatataactct

SEQ ID NO: 40217 - DNA, 20 bp, synthetic construct
  source 1..20: mol_type = other DNA
tcacctaggtcatataactc

SEQ ID NO: 40218 - DNA, 20 bp, synthetic construct
  source 1..20: mol_type = other DNA
atcacctaggtcatataact

SEQ ID NO: 40219 - DNA, 20 bp, synthetic construct
  source 1..20: mol_type = other DNA
gatcacctaggtcatataac

SEQ ID NO: 40220 - DNA, 20 bp, synthetic construct
  source 1..20: mol_type = other DNA
tgatcacctaggtcatataa

SEQ ID NO: 40221 - DNA, 20 bp, synthetic construct
  source 1..20: mol_type = other DNA
ctgatcacctaggtcatata

SEQ ID NO: 40222 - DNA, 20 bp, synthetic construct
  source 1..20: mol_type = other DNA
actgatcacctaggtcatat

SEQ ID NO: 40223 - DNA, 20 bp, synthetic construct
  source 1..20: mol_type = other DNA
cactgatcacctaggtcata

SEQ ID NO: 40224 - DNA, 20 bp, synthetic construct
  source 1..20: mol_type = other DNA
gcactgatcacctaggtcat

SEQ ID NO: 40225 - DNA, 20 bp, synthetic construct
  source 1..20: mol_type = other DNA
tgcactgatcacctaggtca

SEQ ID NO: 40226 - DNA, 20 bp, synthetic construct
  source 1..20: mol_type = other DNA
ctgcactgatcacctaggtc

SEQ ID NO: 40227 - DNA, 20 bp, synthetic construct
  source 1..20: mol_type = other DNA
tctgcactgatcacctaggt

SEQ ID NO: 40228 - DNA, 20 bp, synthetic construct
  source 1..20: mol_type = other DNA
ctctgcactgatcacctagg

SEQ ID NO: 40229 - DNA, 20 bp, synthetic construct
  source 1..20: mol_type = other DNA
tctctgcactgatcacctag

SEQ ID NO: 40230 - DNA, 20 bp, synthetic construct
  source 1..20: mol_type = other DNA
tatctctgcactgatcacct

SEQ ID NO: 40231 - DNA, 20 bp, synthetic construct
  source 1..20: mol_type = other DNA
tgtatctctgcactgatcac

SEQ ID NO: 40232 - DNA, 20 bp, synthetic construct
  source 1..20: mol_type = other DNA
atgtatctctgcactgatca

SEQ ID NO: 40233 - DNA, 20 bp, synthetic construct
  source 1..20: mol_type = other DNA
taccacttgtcagggctctg

SEQ ID NO: 40234 - DNA, 20 bp, synthetic construct
  source 1..20: mol_type = other DNA
tgtaccacttgtcagggctc

SEQ ID NO: 40235 - DNA, 20 bp, synthetic construct
  source 1..20: mol_type = other DNA
atgtaccacttgtcagggct

SEQ ID NO: 40236 - DNA, 20 bp, synthetic construct
  source 1..20: mol_type = other DNA
gatgtaccacttgtcagggc

SEQ ID NO: 40237 - DNA, 20 bp, synthetic construct
  source 1..20: mol_type = other DNA
tgatgtaccacttgtcaggg

SEQ ID NO: 40238 - DNA, 20 bp, synthetic construct
  source 1..20: mol_type = other DNA
gtgatgtaccacttgtcagg

SEQ ID NO: 40239 - DNA, 20 bp, synthetic construct
  source 1..20: mol_type = other DNA
ggtgatgtaccacttgtcag

SEQ ID NO: 40240 - DNA, 20 bp, synthetic construct
  source 1..20: mol_type = other DNA
aggtgatgtaccacttgtca

SEQ ID NO: 40241 - DNA, 20 bp, synthetic construct
  source 1..20: mol_type = other DNA
caggtgatgtaccacttgtc

SEQ ID NO: 40242 - DNA, 20 bp, synthetic construct
  source 1..20: mol_type = other DNA
ccaggtgatgtaccacttgt

SEQ ID NO: 40243 - DNA, 20 bp, synthetic construct
  source 1..20: mol_type = other DNA
cccaggtgatgtaccacttg

SEQ ID NO: 40244 - DNA, 20 bp, synthetic construct
  source 1..20: mol_type = other DNA
acccaggtgatgtaccactt

SEQ ID NO: 40245 - DNA, 20 bp, synthetic construct
  source 1..20: mol_type = other DNA
cacccaggtgatgtaccact

SEQ ID NO: 40246 - DNA, 20 bp, synthetic construct
  source 1..20: mol_type = other DNA
tcacccaggtgatgtaccac

SEQ ID NO: 40247 - DNA, 20 bp, synthetic construct
  source 1..20: mol_type = other DNA
atcacccaggtgatgtacca

SEQ ID NO: 40248 - DNA, 20 bp, synthetic construct
  source 1..20: mol_type = other DNA
gatcacccaggtgatgtacc

SEQ ID NO: 40249 - DNA, 20 bp, synthetic construct
  source 1..20: mol_type = other DNA
tgatcacccaggtgatgtac

SEQ ID NO: 40250 - DNA, 20 bp, synthetic construct
  source 1..20: mol_type = other DNA
cctgcaatgatcacccaggt

SEQ ID NO: 40251 - DNA, 20 bp, synthetic construct
  source 1..20: mol_type = other DNA
ccctgcaatgatcacccagg

SEQ ID NO: 40252 - DNA, 20 bp, synthetic construct
  source 1..20: mol_type = other DNA
tccctgcaatgatcacccag

SEQ ID NO: 40253 - DNA, 20 bp, synthetic construct
  source 1..20: mol_type = other DNA
atccctgcaatgatcaccca

SEQ ID NO: 40254 - DNA, 20 bp, synthetic construct
  source 1..20: mol_type = other DNA
tatccctgcaatgatcaccc

SEQ ID NO: 40255 - DNA, 20 bp, synthetic construct
  source 1..20: mol_type = other DNA
atatccctgcaatgatcacc

SEQ ID NO: 40256 - DNA, 20 bp, synthetic construct
  source 1..20: mol_type = other DNA
catatccctgcaatgatcac

SEQ ID NO: 40257 - DNA, 20 bp, synthetic construct
  source 1..20: mol_type = other DNA
acatatccctgcaatgatca

SEQ ID NO: 40258 - DNA, 20 bp, synthetic construct
  source 1..20: mol_type = other DNA
gacatatccctgcaatgatc

SEQ ID NO: 40259 - DNA, 20 bp, synthetic construct
  source 1..20: mol_type = other DNA
tgacatatccctgcaatgat

SEQ ID NO: 40260 - DNA, 20 bp, synthetic construct
  source 1..20: mol_type = other DNA
gtgacatatccctgcaatga

SEQ ID NO: 40261 - DNA, 20 bp, synthetic construct
  source 1..20: mol_type = other DNA
tgtgacatatccctgcaatg

SEQ ID NO: 40262 - DNA, 20 bp, synthetic construct
  source 1..20: mol_type = other DNA
ttgtgacatatccctgcaat

SEQ ID NO: 40263 - DNA, 20 bp, synthetic construct
  source 1..20: mol_type = other DNA
tttgtgacatatccctgcaa

SEQ ID NO: 40264 - DNA, 20 bp, synthetic construct
  source 1..20: mol_type = other DNA
ctttgtgacatatccctgca

SEQ ID NO: 40265 - DNA, 20 bp, synthetic construct
  source 1..20: mol_type = other DNA
gctttgtgacatatccctgc

SEQ ID NO: 40266 - DNA, 20 bp, synthetic construct
  source 1..20: mol_type = other DNA
tgctttgtgacatatccctg

SEQ ID NO: 40267 - DNA, 20 bp, synthetic construct
  source 1..20: mol_type = other DNA
gtgctttgtgacatatccct

SEQ ID NO: 40268 - DNA, 20 bp, synthetic construct
  source 1..20: mol_type = other DNA
ggtgctttgtgacatatccc

SEQ ID NO: 40269 - DNA, 20 bp, synthetic construct
  source 1..20: mol_type = other DNA
gggtgctttgtgacatatcc

SEQ ID NO: 40270 - DNA, 20 bp, synthetic construct
  source 1..20: mol_type = other DNA
agggtgctttgtgacatatc

SEQ ID NO: 40271 - DNA, 20 bp, synthetic construct
  source 1..20: mol_type = other DNA
cagggtgctttgtgacatat

SEQ ID NO: 40272 - DNA, 20 bp, synthetic construct
  source 1..20: mol_type = other DNA
acagggtgctttgtgacata

SEQ ID NO: 40273 - DNA, 20 bp, synthetic construct
  source 1..20: mol_type = other DNA
tacagggtgctttgtgacat

SEQ ID NO: 40274 - DNA, 20 bp, synthetic construct
  source 1..20: mol_type = other DNA
ctacagggtgctttgtgaca

SEQ ID NO: 40275 - DNA, 20 bp, synthetic construct
  source 1..20: mol_type = other DNA
cctacagggtgctttgtgac

SEQ ID NO: 40276 - DNA, 20 bp, synthetic construct
  source 1..20: mol_type = other DNA
gcctacagggtgctttgtga

SEQ ID NO: 40277 - DNA, 20 bp, synthetic construct
  source 1..20: mol_type = other DNA
tgcctacagggtgctttgtg

SEQ ID NO: 40278 - DNA, 20 bp, synthetic construct
  source 1..20: mol_type = other DNA
tctgcctacagggtgctttg

SEQ ID NO: 40279 - DNA, 20 bp, synthetic construct
  source 1..20: mol_type = other DNA
atctgcctacagggtgcttt

SEQ ID NO: 40280 - DNA, 20 bp, synthetic construct
  source 1..20: mol_type = other DNA
gatctgcctacagggtgctt

SEQ ID NO: 40281 - DNA, 20 bp, synthetic construct
  source 1..20: mol_type = other DNA
taggatctgcctacagggtg

SEQ ID NO: 40282 - DNA, 20 bp, synthetic construct
  source 1..20: mol_type = other DNA
ctaggatctgcctacagggt

SEQ ID NO: 40283 - DNA, 20 bp, synthetic construct
  source 1..20: mol_type = other DNA
taactcttgtctaggatctg

SEQ ID NO: 40284 - DNA, 20 bp, synthetic construct
  source 1..20: mol_type = other DNA
gtaactcttgtctaggatct

SEQ ID NO: 40285 - DNA, 20 bp, synthetic construct
  source 1..20: mol_type = other DNA
tgtaactcttgtctaggatc

SEQ ID NO: 40286 - DNA, 20 bp, synthetic construct
  source 1..20: mol_type = other DNA
atgtaactcttgtctaggat

SEQ ID NO: 40287 - DNA, 20 bp, synthetic construct
  source 1..20: mol_type = other DNA
catgtaactcttgtctagga

SEQ ID NO: 40288 - DNA, 20 bp, synthetic construct
  source 1..20: mol_type = other DNA
tcatgtaactcttgtctagg

SEQ ID NO: 40289 - DNA, 20 bp, synthetic construct
  source 1..20: mol_type = other DNA
gtcatgtaactcttgtctag

SEQ ID NO: 40290 - DNA, 20 bp, synthetic construct
  source 1..20: mol_type = other DNA
ggtcatgtaactcttgtcta

SEQ ID NO: 40291 - DNA, 20 bp, synthetic construct
  source 1..20: mol_type = other DNA
aggtcatgtaactcttgtct

SEQ ID NO: 40292 - DNA, 20 bp, synthetic construct
  source 1..20: mol_type = other DNA
caggtcatgtaactcttgtc

SEQ ID NO: 40293 - DNA, 20 bp, synthetic construct
  source 1..20: mol_type = other DNA
ccaggtcatgtaactcttgt

SEQ ID NO: 40294 - DNA, 20 bp, synthetic construct
  source 1..20: mol_type = other DNA
cccaggtcatgtaactcttg

SEQ ID NO: 40295 - DNA, 20 bp, synthetic construct
  source 1..20: mol_type = other DNA
acccaggtcatgtaactctt

SEQ ID NO: 40296 - DNA, 20 bp, synthetic construct
  source 1..20: mol_type = other DNA
cacccaggtcatgtaactct

SEQ ID NO: 40297 - DNA, 20 bp, synthetic construct
  source 1..20: mol_type = other DNA
tcacccaggtcatgtaactc

SEQ ID NO: 40298 - DNA, 20 bp, synthetic construct
  source 1..20: mol_type = other DNA
atcacccaggtcatgtaact

SEQ ID NO: 40299 - DNA, 20 bp, synthetic construct
  source 1..20: mol_type = other DNA
gatcacccaggtcatgtaac

SEQ ID NO: 40300 - DNA, 20 bp, synthetic construct
  source 1..20: mol_type = other DNA
tgatcacccaggtcatgtaa

SEQ ID NO: 40301 - DNA, 20 bp, synthetic construct
  source 1..20: mol_type = other DNA
ctgatcacccaggtcatgta

SEQ ID NO: 40302 - DNA, 20 bp, synthetic construct
  source 1..20: mol_type = other DNA
actgatcacccaggtcatgt

SEQ ID NO: 40303 - DNA, 20 bp, synthetic construct
  source 1..20: mol_type = other DNA
cactgatcacccaggtcatg

SEQ ID NO: 40304 - DNA, 20 bp, synthetic construct
  source 1..20: mol_type = other DNA
gcactgatcacccaggtcat

SEQ ID NO: 40305 - DNA, 20 bp, synthetic construct
  source 1..20: mol_type = other DNA
tgcactgatcacccaggtca

SEQ ID NO: 40306 - DNA, 20 bp, synthetic construct
  source 1..20: mol_type = other DNA
ctgcactgatcacccaggtc

SEQ ID NO: 40307 - DNA, 20 bp, synthetic construct
  source 1..20: mol_type = other DNA
catgtaactcttgtctaggc

SEQ ID NO: 40308 - DNA, 20 bp, synthetic construct
  source 1..20: mol_type = other DNA
taggtcatgtaactcttgtc

SEQ ID NO: 40309 - DNA, 20 bp, synthetic construct
  source 1..20: mol_type = other DNA
ctaggtcatgtaactcttgt

SEQ ID NO: 40310 - DNA, 20 bp, synthetic construct
  source 1..20: mol_type = other DNA
cctaggtcatgtaactcttg

SEQ ID NO: 40311 - DNA, 20 bp, synthetic construct
  source 1..20: mol_type = other DNA
acctaggtcatgtaactctt

SEQ ID NO: 40312 - DNA, 20 bp, synthetic construct
  source 1..20: mol_type = other DNA
cacctaggtcatgtaactct

SEQ ID NO: 40313 - DNA, 20 bp, synthetic construct
  source 1..20: mol_type = other DNA
tcacctaggtcatgtaactc

SEQ ID NO: 40314 - DNA, 20 bp, synthetic construct
  source 1..20: mol_type = other DNA
atcacctaggtcatgtaact

SEQ ID NO: 40315 - DNA, 20 bp, synthetic construct
  source 1..20: mol_type = other DNA
gatcacctaggtcatgtaac

SEQ ID NO: 40316 - DNA, 20 bp, synthetic construct
  source 1..20: mol_type = other DNA
tgatcacctaggtcatgtaa

SEQ ID NO: 40317 - DNA, 20 bp, synthetic construct
  source 1..20: mol_type = other DNA
ctgatcacctaggtcatgta

SEQ ID NO: 40318 - DNA, 20 bp, synthetic construct
  source 1..20: mol_type = other DNA
actgatcacctaggtcatgt

SEQ ID NO: 40319 - DNA, 20 bp, synthetic construct
  source 1..20: mol_type = other DNA
cactgatcacctaggtcatg

SEQ ID NO: 40320 - DNA, 20 bp, synthetic construct
  source 1..20: mol_type = other DNA
gatgtatctctgcactgatc

SEQ ID NO: 40321 - DNA, 20 bp, synthetic construct
  source 1..20: mol_type = other DNA
cgatgtatctctgcactgat

SEQ ID NO: 40322 - DNA, 20 bp, synthetic construct
  source 1..20: mol_type = other DNA
gcgatgtatctctgcactga

SEQ ID NO: 40323 - DNA, 20 bp, synthetic construct
  source 1..20: mol_type = other DNA
tgcgatgtatctctgcactg

SEQ ID NO: 40324 - DNA, 20 bp, synthetic construct
  source 1..20: mol_type = other DNA
ttgcgatgtatctctgcact

SEQ ID NO: 40325 - DNA, 20 bp, synthetic construct
  source 1..20: mol_type = other DNA
attgcgatgtatctctgcac

SEQ ID NO: 40326 - DNA, 20 bp, synthetic construct
  source 1..20: mol_type = other DNA
cattgcgatgtatctctgca

SEQ ID NO: 40327 - DNA, 20 bp, synthetic construct
  source 1..20: mol_type = other DNA
gcattgcgatgtatctctgc

SEQ ID NO: 40328 - DNA, 20 bp, synthetic construct
  source 1..20: mol_type = other DNA
ggcattgcgatgtatctctg

SEQ ID NO: 40329 - DNA, 20 bp, synthetic construct
  source 1..20: mol_type = other DNA
gggcattgcgatgtatctct

SEQ ID NO: 40330 - DNA, 20 bp, synthetic construct
  source 1..20: mol_type = other DNA
ggggcattgcgatgtatctc

SEQ ID NO: 40331 - DNA, 20 bp, synthetic construct
  source 1..20: mol_type = other DNA
aggggcattgcgatgtatct

SEQ ID NO: 40332 - DNA, 20 bp, synthetic construct
  source 1..20: mol_type = other DNA
caggggcattgcgatgtatc

SEQ ID NO: 40333 - DNA, 20 bp, synthetic construct
  source 1..20: mol_type = other DNA
acaggggcattgcgatgtat

SEQ ID NO: 40334 - DNA, 20 bp, synthetic construct
  source 1..20: mol_type = other DNA
tacaggggcattgcgatgta

SEQ ID NO: 40335 - DNA, 20 bp, synthetic construct
  source 1..20: mol_type = other DNA
ctacaggggcattgcgatgt

SEQ ID NO: 40336 - DNA, 20 bp, synthetic construct
  source 1..20: mol_type = other DNA
cctacaggggcattgcgatg

SEQ ID NO: 40337 - DNA, 20 bp, synthetic construct
  source 1..20: mol_type = other DNA
gcctacaggggcattgcgat

SEQ ID NO: 40338 - DNA, 20 bp, synthetic construct
  source 1..20: mol_type = other DNA
tgcctacaggggcattgcga

SEQ ID NO: 40339 - DNA, 20 bp, synthetic construct
  source 1..20: mol_type = other DNA
caaggctctgcctacagggg

SEQ ID NO: 40340 - DNA, 20 bp, synthetic construct
  source 1..20: mol_type = other DNA
tcaaggctctgcctacaggg

SEQ ID NO: 40341 - DNA, 20 bp, synthetic construct
  source 1..20: mol_type = other DNA
gtcaaggctctgcctacagg

SEQ ID NO: 40342 - DNA, 20 bp, synthetic construct
  source 1..20: mol_type = other DNA
tgtcaaggctctgcctacag

SEQ ID NO: 40343 - DNA, 20 bp, synthetic construct
  source 1..20: mol_type = other DNA
ttgtcaaggctctgcctaca

SEQ ID NO: 40344 - DNA, 20 bp, synthetic construct
  source 1..20: mol_type = other DNA
cttgtcaaggctctgcctac

SEQ ID NO: 40345 - DNA, 20 bp, synthetic construct
  source 1..20: mol_type = other DNA
acttgtcaaggctctgccta

SEQ ID NO: 40346 - DNA, 20 bp, synthetic construct
  source 1..20: mol_type = other DNA
cacttgtcaaggctctgcct

SEQ ID NO: 40347 - DNA, 20 bp, synthetic construct
  source 1..20: mol_type = other DNA
accacttgtcaaggctctgc

SEQ ID NO: 40348 - DNA, 20 bp, synthetic construct
  source 1..20: mol_type = other DNA
taccacttgtcaaggctctg

SEQ ID NO: 40349 - DNA, 20 bp, synthetic construct
  source 1..20: mol_type = other DNA
gtaccacttgtcaaggctct

SEQ ID NO: 40350 - DNA, 20 bp, synthetic construct
  source 1..20: mol_type = other DNA
tgtaccacttgtcaaggctc

SEQ ID NO: 40351 - DNA, 20 bp, synthetic construct
  source 1..20: mol_type = other DNA
atgtaccacttgtcaaggct

SEQ ID NO: 40352 - DNA, 20 bp, synthetic construct
  source 1..20: mol_type = other DNA
gatgtaccacttgtcaaggc

SEQ ID NO: 40353 - DNA, 20 bp, synthetic construct
  source 1..20: mol_type = other DNA
tgatgtaccacttgtcaagg

SEQ ID NO: 40354 - DNA, 20 bp, synthetic construct
  source 1..20: mol_type = other DNA
gtgatgtaccacttgtcaag

SEQ ID NO: 40355 - DNA, 20 bp, synthetic construct
  source 1..20: mol_type = other DNA
ggtgatgtaccacttgtcaa

SEQ ID NO: 40356 - DNA, 20 bp, synthetic construct
  source 1..20: mol_type = other DNA
ttacagggtgctttgtgaca

SEQ ID NO: 40357 - DNA, 20 bp, synthetic construct
  source 1..20: mol_type = other DNA
cttacagggtgctttgtgac

SEQ ID NO: 40358 - DNA, 20 bp, synthetic construct
  source 1..20: mol_type = other DNA
gcttacagggtgctttgtga

SEQ ID NO: 40359 - DNA, 20 bp, synthetic construct
  source 1..20: mol_type = other DNA
tgcttacagggtgctttgtg

SEQ ID NO: 40360 - DNA, 20 bp, synthetic construct
  source 1..20: mol_type = other DNA
ctgcttacagggtgctttgt

SEQ ID NO: 40361 - DNA, 20 bp, synthetic construct
  source 1..20: mol_type = other DNA
tctgcttacagggtgctttg

SEQ ID NO: 40362 - DNA, 20 bp, synthetic construct
  source 1..20: mol_type = other DNA
atctgcttacagggtgcttt

SEQ ID NO: 40363 - DNA, 20 bp, synthetic construct
  source 1..20: mol_type = other DNA
gatctgcttacagggtgctt

SEQ ID NO: 40364 - DNA, 20 bp, synthetic construct
  source 1..20: mol_type = other DNA
ggatctgcttacagggtgct

SEQ ID NO: 40365 - DNA, 20 bp, synthetic construct
  source 1..20: mol_type = other DNA
aggatctgcttacagggtgc

SEQ ID NO: 40366 - DNA, 20 bp, synthetic construct
  source 1..20: mol_type = other DNA
taggatctgcttacagggtg

SEQ ID NO: 40367 - DNA, 20 bp, synthetic construct
  source 1..20: mol_type = other DNA
ctaggatctgcttacagggt

SEQ ID NO: 40368 - DNA, 20 bp, synthetic construct
  source 1..20: mol_type = other DNA
tctaggatctgcttacaggg

SEQ ID NO: 40369 - DNA, 20 bp, synthetic construct
  source 1..20: mol_type = other DNA
ctctaggatctgcttacagg

SEQ ID NO: 40370 - DNA, 20 bp, synthetic construct
  source 1..20: mol_type = other DNA
tctctaggatctgcttacag

SEQ ID NO: 40371 - DNA, 20 bp, synthetic construct
  source 1..20: mol_type = other DNA
ttctctaggatctgcttaca

SEQ ID NO: 40372 - DNA, 20 bp, synthetic construct
  source 1..20: mol_type = other DNA
cttctctaggatctgcttac

SEQ ID NO: 40373 - DNA, 20 bp, synthetic construct
  source 1..20: mol_type = other DNA
tcttctctaggatctgctta

SEQ ID NO: 40374 - DNA, 20 bp, synthetic construct
  source 1..20: mol_type = other DNA
ctcttctctaggatctgctt

SEQ ID NO: 40375 - DNA, 20 bp, synthetic construct
  source 1..20: mol_type = other DNA
actcttctctaggatctgct

SEQ ID NO: 40376 - DNA, 20 bp, synthetic construct
  source 1..20: mol_type = other DNA
aactcttctctaggatctgc

SEQ ID NO: 40377 - DNA, 20 bp, synthetic construct
  source 1..20: mol_type = other DNA
taactcttctctaggatctg

SEQ ID NO: 40378 - DNA, 20 bp, synthetic construct
  source 1..20: mol_type = other DNA
ataactcttctctaggatct

SEQ ID NO: 40379 - DNA, 20 bp, synthetic construct
  source 1..20: mol_type = other DNA
tataactcttctctaggatc

SEQ ID NO: 40380 - DNA, 20 bp, synthetic construct
  source 1..20: mol_type = other DNA
atataactcttctctaggat

SEQ ID NO: 40381 - DNA, 20 bp, synthetic construct
  source 1..20: mol_type = other DNA
gatataactcttctctagga

SEQ ID NO: 40382 - DNA, 20 bp, synthetic construct
  source 1..20: mol_type = other DNA
tgatataactcttctctagg

SEQ ID NO: 40383 - DNA, 20 bp, synthetic construct
  source 1..20: mol_type = other DNA
gtgatataactcttctctag

SEQ ID NO: 40384 - DNA, 20 bp, synthetic construct
  source 1..20: mol_type = other DNA
ggtgatataactcttctcta

SEQ ID NO: 40385 - DNA, 20 bp, synthetic construct
  source 1..20: mol_type = other DNA
aggtgatataactcttctct

SEQ ID NO: 40386 - DNA, 20 bp, synthetic construct
  source 1..20: mol_type = other DNA
caggtgatataactcttctc

SEQ ID NO: 40387 - DNA, 20 bp, synthetic construct
  source 1..20: mol_type = other DNA
ccaggtgatataactcttct

SEQ ID NO: 40388 - DNA, 20 bp, synthetic construct
  source 1..20: mol_type = other DNA
cccaggtgatataactcttc

SEQ ID NO: 40389 - DNA, 20 bp, synthetic construct
  source 1..20: mol_type = other DNA
acccaggtgatataactctt

SEQ ID NO: 40390 - DNA, 20 bp, synthetic construct
  source 1..20: mol_type = other DNA
cacccaggtgatataactct

SEQ ID NO: 40391 - DNA, 20 bp, synthetic construct
  source 1..20: mol_type = other DNA
tcacccaggtgatataactc

SEQ ID NO: 40392 - DNA, 20 bp, synthetic construct
  source 1..20: mol_type = other DNA
atcacccaggtgatataact

SEQ ID NO: 40393 - DNA, 20 bp, synthetic construct
  source 1..20: mol_type = other DNA
gatcacccaggtgatataac

SEQ ID NO: 40394 - DNA, 20 bp, synthetic construct
  source 1..20: mol_type = other DNA
tgatcacccaggtgatataa

SEQ ID NO: 40395 - DNA, 20 bp, synthetic construct
  source 1..20: mol_type = other DNA
ctgatcacccaggtgatata

SEQ ID NO: 40396 - DNA, 20 bp, synthetic construct
  source 1..20: mol_type = other DNA
actgatcacccaggtgatat

SEQ ID NO: 40397 - DNA, 20 bp, synthetic construct
  source 1..20: mol_type = other DNA
cactgatcacccaggtgata

SEQ ID NO: 40398 - DNA, 20 bp, synthetic construct
  source 1..20: mol_type = other DNA
cttgtgacatatctctgcac

SEQ ID NO: 40399 - DNA, 20 bp, synthetic construct
  source 1..20: mol_type = other DNA
gcttgtgacatatctctgca

SEQ ID NO: 40400 - DNA, 20 bp, synthetic construct
  source 1..20: mol_type = other DNA
ggcttgtgacatatctctgc

SEQ ID NO: 40401 - DNA, 20 bp, synthetic construct
  source 1..20: mol_type = other DNA
gggcttgtgacatatctctg

SEQ ID NO: 40402 - DNA, 20 bp, synthetic construct
  source 1..20: mol_type = other DNA
ggggcttgtgacatatctct

SEQ ID NO: 40403 - DNA, 20 bp, synthetic construct
  source 1..20: mol_type = other DNA
gggggcttgtgacatatctc

SEQ ID NO: 40404 - DNA, 20 bp, synthetic construct
  source 1..20: mol_type = other DNA
agggggcttgtgacatatct

SEQ ID NO: 40405 - DNA, 20 bp, synthetic construct
  source 1..20: mol_type = other DNA
cagggggcttgtgacatatc

SEQ ID NO: 40406 - DNA, 20 bp, synthetic construct
  source 1..20: mol_type = other DNA
acagggggcttgtgacatat

SEQ ID NO: 40407 - DNA, 20 bp, synthetic construct
  source 1..20: mol_type = other DNA
tacagggggcttgtgacata

SEQ ID NO: 40408 - DNA, 20 bp, synthetic construct
  source 1..20: mol_type = other DNA
ctacagggggcttgtgacat

SEQ ID NO: 40409 - DNA, 20 bp, synthetic construct
  source 1..20: mol_type = other DNA
cctacagggggcttgtgaca

SEQ ID NO: 40410 - DNA, 20 bp, synthetic construct
  source 1..20: mol_type = other DNA
gatataactcttgtctaggc

SEQ ID NO: 40411 - DNA, 20 bp, synthetic construct
  source 1..20: mol_type = other DNA
tgatataactcttgtctagg

SEQ ID NO: 40412 - DNA, 20 bp, synthetic construct
  source 1..20: mol_type = other DNA
gtgatataactcttgtctag

SEQ ID NO: 40413 - DNA, 20 bp, synthetic construct
  source 1..20: mol_type = other DNA
ggtgatataactcttgtcta

SEQ ID NO: 40414 - DNA, 20 bp, synthetic construct
  source 1..20: mol_type = other DNA
aggtgatataactcttgtct

SEQ ID NO: 40415 - DNA, 20 bp, synthetic construct
  source 1..20: mol_type = other DNA
caggtgatataactcttgtc

SEQ ID NO: 40416 - DNA, 20 bp, synthetic construct
  source 1..20: mol_type = other DNA
ccaggtgatataactcttgt

SEQ ID NO: 40417 - DNA, 20 bp, synthetic construct
  source 1..20: mol_type = other DNA
cccaggtgatataactcttg

SEQ ID NO: 40418 - DNA, 20 bp, synthetic construct
  source 1..20: mol_type = other DNA
actgcactgatcacccaggt

SEQ ID NO: 40419 - DNA, 20 bp, synthetic construct
  source 1..20: mol_type = other DNA
cactgcactgatcacccagg

SEQ ID NO: 40420 - DNA, 20 bp, synthetic construct
  source 1..20: mol_type = other DNA
tcactgcactgatcacccag

SEQ ID NO: 40421 - DNA, 20 bp, synthetic construct
  source 1..20: mol_type = other DNA
atcactgcactgatcaccca

SEQ ID NO: 40422 - DNA, 20 bp, synthetic construct
  source 1..20: mol_type = other DNA
tatcactgcactgatcaccc

SEQ ID NO: 40423 - DNA, 20 bp, synthetic construct
  source 1..20: mol_type = other DNA
ctcccaggtgctgtaacttt

SEQ ID NO: 40424 - DNA, 20 bp, synthetic construct
  source 1..20: mol_type = other DNA
tctcccaggtgctgtaactt

SEQ ID NO: 40425 - DNA, 20 bp, synthetic construct
  source 1..20: mol_type = other DNA
atctcccaggtgctgtaact

SEQ ID NO: 40426 - DNA, 20 bp, synthetic construct
  source 1..20: mol_type = other DNA
gatctcccaggtgctgtaac

SEQ ID NO: 40427 - DNA, 20 bp, synthetic construct
  source 1..20: mol_type = other DNA
tgatctcccaggtgctgtaa

SEQ ID NO: 40428 - DNA, 20 bp, synthetic construct
  source 1..20: mol_type = other DNA
cactgatctcccaggtgctg

SEQ ID NO: 40429 - DNA, 20 bp, synthetic construct
  source 1..20: mol_type = other DNA
ctgcactgatctcccaggtg

SEQ ID NO: 40430 - DNA, 20 bp, synthetic construct
  source 1..20: mol_type = other DNA
tctctgcactgatctcccag

SEQ ID NO: 40431 - DNA, 20 bp, synthetic construct
  source 1..20: mol_type = other DNA
atctctgcactgatctccca

SEQ ID NO: 40432 - DNA, 20 bp, synthetic construct
  source 1..20: mol_type = other DNA
tatctctgcactgatctccc

SEQ ID NO: 40433 - DNA, 20 bp, synthetic construct
  source 1..20: mol_type = other DNA
atatctctgcactgatctcc

SEQ ID NO: 40434 - DNA, 20 bp, synthetic construct
  source 1..20: mol_type = other DNA
catatctctgcactgatctc

SEQ ID NO: 40435 - DNA, 20 bp, synthetic construct
  source 1..20: mol_type = other DNA
acatatctctgcactgatct

SEQ ID NO: 40436 - DNA, 20 bp, synthetic construct
  source 1..20: mol_type = other DNA
tggggacattgtgacatatc

SEQ ID NO: 40437 - DNA, 20 bp, synthetic construct
  source 1..20: mol_type = other DNA
ctggggacattgtgacatat

SEQ ID NO: 40438 - DNA, 20 bp, synthetic construct
  source 1..20: mol_type = other DNA
actggggacattgtgacata

SEQ ID NO: 40439 - DNA, 20 bp, synthetic construct
  source 1..20: mol_type = other DNA
tactggggacattgtgacat

SEQ ID NO: 40440 - DNA, 20 bp, synthetic construct
  source 1..20: mol_type = other DNA
ctactggggacattgtgaca

SEQ ID NO: 40441 - DNA, 20 bp, synthetic construct
  source 1..20: mol_type = other DNA
cctactggggacattgtgac

SEQ ID NO: 40442 - DNA, 20 bp, synthetic construct
  source 1..20: mol_type = other DNA
gcctactggggacattgtga

SEQ ID NO: 40443 - DNA, 20 bp, synthetic construct
  source 1..20: mol_type = other DNA
tgcctactggggacattgtg

SEQ ID NO: 40444 - DNA, 20 bp, synthetic construct
  source 1..20: mol_type = other DNA
ctgcctactggggacattgt

SEQ ID NO: 40445 - DNA, 20 bp, synthetic construct
  source 1..20: mol_type = other DNA
tctgcctactggggacattg

SEQ ID NO: 40446 - DNA, 20 bp, synthetic construct
  source 1..20: mol_type = other DNA
ctctgcctactggggacatt

SEQ ID NO: 40447 - DNA, 20 bp, synthetic construct
  source 1..20: mol_type = other DNA
tctctgcctactggggacat

SEQ ID NO: 40448 - DNA, 20 bp, synthetic construct
  source 1..20: mol_type = other DNA
aactcttgcctggtctctgc

SEQ ID NO: 40449 - DNA, 20 bp, synthetic construct
  source 1..20: mol_type = other DNA
caactcttgcctggtctctg

SEQ ID NO: 40450 - DNA, 20 bp, synthetic construct
  source 1..20: mol_type = other DNA
atccaactcttgcctggtct

SEQ ID NO: 40451 - DNA, 20 bp, synthetic construct
  source 1..20: mol_type = other DNA
gatccaactcttgcctggtc

SEQ ID NO: 40452 - DNA, 20 bp, synthetic construct
  source 1..20: mol_type = other DNA
tgatccaactcttgcctggt

SEQ ID NO: 40453 - DNA, 20 bp, synthetic construct
  source 1..20: mol_type = other DNA
gtgatccaactcttgcctgg

SEQ ID NO: 40454 - DNA, 20 bp, synthetic construct
  source 1..20: mol_type = other DNA
ggtgatccaactcttgcctg

SEQ ID NO: 40455 - DNA, 20 bp, synthetic construct
  source 1..20: mol_type = other DNA
aggtgatccaactcttgcct

SEQ ID NO: 40456 - DNA, 20 bp, synthetic construct
  source 1..20: mol_type = other DNA
gaggtgatccaactcttgcc

SEQ ID NO: 40457 - DNA, 20 bp, synthetic construct
  source 1..20: mol_type = other DNA
cgaggtgatccaactcttgc

SEQ ID NO: 40458 - DNA, 20 bp, synthetic construct
  source 1..20: mol_type = other DNA
ccgaggtgatccaactcttg

SEQ ID NO: 40459 - DNA, 20 bp, synthetic construct
  source 1..20: mol_type = other DNA
cccgaggtgatccaactctt

SEQ ID NO: 40460 - DNA, 20 bp, synthetic construct
  source 1..20: mol_type = other DNA
tcccgaggtgatccaactct

SEQ ID NO: 40461 - DNA, 20 bp, synthetic construct
  source 1..20: mol_type = other DNA
atcccgaggtgatccaactc

SEQ ID NO: 40462 - DNA, 20 bp, synthetic construct
  source 1..20: mol_type = other DNA
gatcccgaggtgatccaact

SEQ ID NO: 40463 - DNA, 20 bp, synthetic construct
  source 1..20: mol_type = other DNA
tgatcccgaggtgatccaac

SEQ ID NO: 40464 - DNA, 20 bp, synthetic construct
  source 1..20: mol_type = other DNA
ctgatcccgaggtgatccaa

SEQ ID NO: 40465 - DNA, 20 bp, synthetic construct
  source 1..20: mol_type = other DNA
actgatcccgaggtgatcca

SEQ ID NO: 40466 - DNA, 20 bp, synthetic construct
  source 1..20: mol_type = other DNA
cactgatcccgaggtgatcc

SEQ ID NO: 40467 - DNA, 20 bp, synthetic construct
  source 1..20: mol_type = other DNA
gcactgatcccgaggtgatc

SEQ ID NO: 40468 - DNA, 20 bp, synthetic construct
  source 1..20: mol_type = other DNA
tgcactgatcccgaggtgat

SEQ ID NO: 40469 - DNA, 20 bp, synthetic construct
  source 1..20: mol_type = other DNA
ctgcactgatcccgaggtga

SEQ ID NO: 40470 - DNA, 20 bp, synthetic construct
  source 1..20: mol_type = other DNA
tctgcactgatcccgaggtg

SEQ ID NO: 40471 - DNA, 20 bp, synthetic construct
  source 1..20: mol_type = other DNA
tctctgcactgatcccgagg

SEQ ID NO: 40472 - DNA, 20 bp, synthetic construct
  source 1..20: mol_type = other DNA
atctctgcactgatcccgag

SEQ ID NO: 40473 - DNA, 20 bp, synthetic construct
  source 1..20: mol_type = other DNA
tatctctgcactgatcccga

SEQ ID NO: 40474 - DNA, 20 bp, synthetic construct
  source 1..20: mol_type = other DNA
atatctctgcactgatcccg

SEQ ID NO: 40475 - DNA, 20 bp, synthetic construct
  source 1..20: mol_type = other DNA
catatctctgcactgatccc

SEQ ID NO: 40476 - DNA, 20 bp, synthetic construct
  source 1..20: mol_type = other DNA
acatatctctgcactgatcc

SEQ ID NO: 40477 - DNA, 20 bp, synthetic construct
  source 1..20: mol_type = other DNA
agacatatctctgcactgat

SEQ ID NO: 40478 - DNA, 20 bp, synthetic construct
  source 1..20: mol_type = other DNA
gagacatatctctgcactga

SEQ ID NO: 40479 - DNA, 20 bp, synthetic construct
  source 1..20: mol_type = other DNA
tgagacatatctctgcactg

SEQ ID NO: 40480 - DNA, 20 bp, synthetic construct
  source 1..20: mol_type = other DNA
ttgagacatatctctgcact

SEQ ID NO: 40481 - DNA, 20 bp, synthetic construct
  source 1..20: mol_type = other DNA
attgagacatatctctgcac

SEQ ID NO: 40482 - DNA, 20 bp, synthetic construct
  source 1..20: mol_type = other DNA
gattgagacatatctctgca

SEQ ID NO: 40483 - DNA, 20 bp, synthetic construct
  source 1..20: mol_type = other DNA
ggattgagacatatctctgc

SEQ ID NO: 40484 - DNA, 20 bp, synthetic construct
  source 1..20: mol_type = other DNA
gggattgagacatatctctg

SEQ ID NO: 40485 - DNA, 20 bp, synthetic construct
  source 1..20: mol_type = other DNA
ggggattgagacatatctct

SEQ ID NO: 40486 - DNA, 20 bp, synthetic construct
  source 1..20: mol_type = other DNA
gggggattgagacatatctc

SEQ ID NO: 40487 - DNA, 20 bp, synthetic construct
  source 1..20: mol_type = other DNA
agggggattgagacatatct

SEQ ID NO: 40488 - DNA, 20 bp, synthetic construct
  source 1..20: mol_type = other DNA
cagggggattgagacatatc

SEQ ID NO: 40489 - DNA, 20 bp, synthetic construct
  source 1..20: mol_type = other DNA
acagggggattgagacatat

SEQ ID NO: 40490 - DNA, 20 bp, synthetic construct
  source 1..20: mol_type = other DNA
cacagggggattgagacata

SEQ ID NO: 40491 - DNA, 20 bp, synthetic construct
  source 1..20: mol_type = other DNA
ccacagggggattgagacat

SEQ ID NO: 40492 - DNA, 20 bp, synthetic construct
  source 1..20: mol_type = other DNA
cccacagggggattgagaca

SEQ ID NO: 40493 - DNA, 20 bp, synthetic construct
  source 1..20: mol_type = other DNA
gcccacagggggattgagac

SEQ ID NO: 40494 - DNA, 20 bp, synthetic construct
  source 1..20: mol_type = other DNA
tgcccacagggggattgaga

SEQ ID NO: 40495 - DNA, 20 bp, synthetic construct
  source 1..20: mol_type = other DNA
aactcttgtctaggctgtgc

SEQ ID NO: 40496 - DNA, 20 bp, synthetic construct
  source 1..20: mol_type = other DNA
taactcttgtctaggctgtg

SEQ ID NO: 40497 - DNA, 20 bp, synthetic construct
  source 1..20: mol_type = other DNA
gcactgttaaccgaggtgat

SEQ ID NO: 40498 - DNA, 20 bp, synthetic construct
  source 1..20: mol_type = other DNA
tgcactgttaaccgaggtga

SEQ ID NO: 40499 - DNA, 20 bp, synthetic construct
  source 1..20: mol_type = other DNA
ctgcactgttaaccgaggtg

SEQ ID NO: 40500 - DNA, 20 bp, synthetic construct
  source 1..20: mol_type = other DNA
tctgcactgttaaccgaggt

SEQ ID NO: 40501 - DNA, 20 bp, synthetic construct
  source 1..20: mol_type = other DNA
ctctgcactgttaaccgagg

SEQ ID NO: 40502 - DNA, 20 bp, synthetic construct
  source 1..20: mol_type = other DNA
tctctgcactgttaaccgag

SEQ ID NO: 40503 - DNA, 20 bp, synthetic construct
  source 1..20: mol_type = other DNA
atctctgcactgttaaccga

SEQ ID NO: 40504 - DNA, 20 bp, synthetic construct
  source 1..20: mol_type = other DNA
tatctctgcactgttaaccg

SEQ ID NO: 40505 - DNA, 20 bp, synthetic construct
  source 1..20: mol_type = other DNA
atatctctgcactgttaacc

SEQ ID NO: 40506 - DNA, 20 bp, synthetic construct
  source 1..20: mol_type = other DNA
catatctctgcactgttaac

SEQ ID NO: 40507 - DNA, 20 bp, synthetic construct
  source 1..20: mol_type = other DNA
acatatctctgcactgttaa

SEQ ID NO: 40508 - DNA, 20 bp, synthetic construct
  source 1..20: mol_type = other DNA
gacatatctctgcactgtta

SEQ ID NO: 40509 - DNA, 20 bp, synthetic construct
  source 1..20: mol_type = other DNA
tgacatatctctgcactgtt

SEQ ID NO: 40510 - DNA, 20 bp, synthetic construct
  source 1..20: mol_type = other DNA
ttgacatatctctgcactgt

SEQ ID NO: 40511 - DNA, 20 bp, synthetic construct
  source 1..20: mol_type = other DNA
tttgacatatctctgcactg

SEQ ID NO: 40512 - DNA, 20 bp, synthetic construct
  source 1..20: mol_type = other DNA
ttttgacatatctctgcact

SEQ ID NO: 40513 - DNA, 20 bp, synthetic construct
  source 1..20: mol_type = other DNA
attttgacatatctctgcac

SEQ ID NO: 40514 - DNA, 20 bp, synthetic construct
  source 1..20: mol_type = other DNA
cattttgacatatctctgca

SEQ ID NO: 40515 - DNA, 20 bp, synthetic construct
  source 1..20: mol_type = other DNA
gcattttgacatatctctgc

SEQ ID NO: 40516 - DNA, 20 bp, synthetic construct
  source 1..20: mol_type = other DNA
ggcattttgacatatctctg

SEQ ID NO: 40517 - DNA, 20 bp, synthetic construct
  source 1..20: mol_type = other DNA
gggcattttgacatatctct

SEQ ID NO: 40518 - DNA, 20 bp, synthetic construct
  source 1..20: mol_type = other DNA
ggggcattttgacatatctc

SEQ ID NO: 40519 - DNA, 20 bp, synthetic construct
  source 1..20: mol_type = other DNA
aggggcattttgacatatct

SEQ ID NO: 40520 - DNA, 20 bp, synthetic construct
  source 1..20: mol_type = other DNA
caggggcattttgacatatc

SEQ ID NO: 40521 - DNA, 20 bp, synthetic construct
  source 1..20: mol_type = other DNA
acaggggcattttgacatat

SEQ ID NO: 40522 - DNA, 20 bp, synthetic construct
  source 1..20: mol_type = other DNA
tacaggggcattttgacata

SEQ ID NO: 40523 - DNA, 20 bp, synthetic construct
  source 1..20: mol_type = other DNA
ctacaggggcattttgacat

SEQ ID NO: 40524 - DNA, 20 bp, synthetic construct
  source 1..20: mol_type = other DNA
cctacaggggcattttgaca

SEQ ID NO: 40525 - DNA, 20 bp, synthetic construct
  source 1..20: mol_type = other DNA
gcctacaggggcattttgac

SEQ ID NO: 40526 - DNA, 20 bp, synthetic construct
  source 1..20: mol_type = other DNA
tgcctacaggggcattttga

SEQ ID NO: 40527 - DNA, 20 bp, synthetic construct
  source 1..20: mol_type = other DNA
ttgcctacaggggcattttg

SEQ ID NO: 40528 - DNA, 20 bp, synthetic construct
  source 1..20: mol_type = other DNA
cttgcctacaggggcatttt

SEQ ID NO: 40529 - DNA, 20 bp, synthetic construct
  source 1..20: mol_type = other DNA
tgtgtaggcttgcctacagg

SEQ ID NO: 40530 - DNA, 20 bp, synthetic construct
  source 1..20: mol_type = other DNA
ttgtgtaggcttgcctacag

SEQ ID NO: 40531 - DNA, 20 bp, synthetic construct
  source 1..20: mol_type = other DNA
cttgtgtaggcttgcctaca

SEQ ID NO: 40532 - DNA, 20 bp, synthetic construct
  source 1..20: mol_type = other DNA
acttgtgtaggcttgcctac

SEQ ID NO: 40533 - DNA, 20 bp, synthetic construct
  source 1..20: mol_type = other DNA
tacttgtgtaggcttgccta

SEQ ID NO: 40534 - DNA, 20 bp, synthetic construct
  source 1..20: mol_type = other DNA
atacttgtgtaggcttgcct

SEQ ID NO: 40535 - DNA, 20 bp, synthetic construct
  source 1..20: mol_type = other DNA
aatacttgtgtaggcttgcc

SEQ ID NO: 40536 - DNA, 20 bp, synthetic construct
  source 1..20: mol_type = other DNA
taatacttgtgtaggcttgc

SEQ ID NO: 40537 - DNA, 20 bp, synthetic construct
  source 1..20: mol_type = other DNA
gtaatacttgtgtaggcttg

SEQ ID NO: 40538 - DNA, 20 bp, synthetic construct
  source 1..20: mol_type = other DNA
tgtaatacttgtgtaggctt

SEQ ID NO: 40539 - DNA, 20 bp, synthetic construct
  source 1..20: mol_type = other DNA
atgtaatacttgtgtaggct

SEQ ID NO: 40540 - DNA, 20 bp, synthetic construct
  source 1..20: mol_type = other DNA
gatgtaatacttgtgtaggc

SEQ ID NO: 40541 - DNA, 20 bp, synthetic construct
  source 1..20: mol_type = other DNA
tgatgtaatacttgtgtagg

SEQ ID NO: 40542 - DNA, 20 bp, synthetic construct
  source 1..20: mol_type = other DNA
gtgatgtaatacttgtgtag

SEQ ID NO: 40543 - DNA, 20 bp, synthetic construct
  source 1..20: mol_type = other DNA
agtgatgtaatacttgtgta

SEQ ID NO: 40544 - DNA, 20 bp, synthetic construct
  source 1..20: mol_type = other DNA
acctaagtgatgtaatactt

SEQ ID NO: 40545 - DNA, 20 bp, synthetic construct
  source 1..20: mol_type = other DNA
cacctaagtgatgtaatact

SEQ ID NO: 40546 - DNA, 20 bp, synthetic construct
  source 1..20: mol_type = other DNA
tcacctaagtgatgtaatac

SEQ ID NO: 40547 - DNA, 20 bp, synthetic construct
  source 1..20: mol_type = other DNA
gatcacctaagtgatgtaat

SEQ ID NO: 40548 - DNA, 20 bp, synthetic construct
  source 1..20: mol_type = other DNA
gtattgtgacatatctctgc

SEQ ID NO: 40549 - DNA, 20 bp, synthetic construct
  source 1..20: mol_type = other DNA
ggtattgtgacatatctctg

SEQ ID NO: 40550 - DNA, 20 bp, synthetic construct
  source 1..20: mol_type = other DNA
gggtattgtgacatatctct

SEQ ID NO: 40551 - DNA, 20 bp, synthetic construct
  source 1..20: mol_type = other DNA
ggggtattgtgacatatctc

SEQ ID NO: 40552 - DNA, 20 bp, synthetic construct
  source 1..20: mol_type = other DNA
gggggtattgtgacatatct

SEQ ID NO: 40553 - DNA, 20 bp, synthetic construct
  source 1..20: mol_type = other DNA
agggggtattgtgacatatc

SEQ ID NO: 40554 - DNA, 20 bp, synthetic construct
  source 1..20: mol_type = other DNA
cagggggtattgtgacatat

SEQ ID NO: 40555 - DNA, 20 bp, synthetic construct
  source 1..20: mol_type = other DNA
acagggggtattgtgacata

SEQ ID NO: 40556 - DNA, 20 bp, synthetic construct
  source 1..20: mol_type = other DNA
tacagggggtattgtgacat

SEQ ID NO: 40557 - DNA, 20 bp, synthetic construct
  source 1..20: mol_type = other DNA
ttacagggggtattgtgaca

SEQ ID NO: 40558 - DNA, 20 bp, synthetic construct
  source 1..20: mol_type = other DNA
cttacagggggtattgtgac

SEQ ID NO: 40559 - DNA, 20 bp, synthetic construct
  source 1..20: mol_type = other DNA
gcttacagggggtattgtga

SEQ ID NO: 40560 - DNA, 20 bp, synthetic construct
  source 1..20: mol_type = other DNA
tgcttacagggggtattgtg

SEQ ID NO: 40561 - DNA, 20 bp, synthetic construct
  source 1..20: mol_type = other DNA
ctgcttacagggggtattgt

SEQ ID NO: 40562 - DNA, 20 bp, synthetic construct
  source 1..20: mol_type = other DNA
tctgcttacagggggtattg

SEQ ID NO: 40563 - DNA, 20 bp, synthetic construct
  source 1..20: mol_type = other DNA
ctctgcttacagggggtatt

SEQ ID NO: 40564 - DNA, 20 bp, synthetic construct
  source 1..20: mol_type = other DNA
gctctgcttacagggggtat

SEQ ID NO: 40565 - DNA, 20 bp, synthetic construct
  source 1..20: mol_type = other DNA
taggctctgcttacaggggg

SEQ ID NO: 40566 - DNA, 20 bp, synthetic construct
  source 1..20: mol_type = other DNA
ctaggctctgcttacagggg

SEQ ID NO: 40567 - DNA, 20 bp, synthetic construct
  source 1..20: mol_type = other DNA
tctaggctctgcttacaggg

SEQ ID NO: 40568 - DNA, 20 bp, synthetic construct
  source 1..20: mol_type = other DNA
gtctaggctctgcttacagg

SEQ ID NO: 40569 - DNA, 20 bp, synthetic construct
  source 1..20: mol_type = other DNA
tgtctaggctctgcttacag

SEQ ID NO: 40570 - DNA, 20 bp, synthetic construct
  source 1..20: mol_type = other DNA
ttgtctaggctctgcttaca

SEQ ID NO: 40571 - DNA, 20 bp, synthetic construct
  source 1..20: mol_type = other DNA
cttgtctaggctctgcttac

SEQ ID NO: 40572 - DNA, 20 bp, synthetic construct
  source 1..20: mol_type = other DNA
tcttgtctaggctctgctta

SEQ ID NO: 40573 - DNA, 20 bp, synthetic construct
  source 1..20: mol_type = other DNA
cacatatctctgcactgatc

SEQ ID NO: 40574 - DNA, 20 bp, synthetic construct
  source 1..20: mol_type = other DNA
gtcacatatctctgcactga

SEQ ID NO: 40575 - DNA, 20 bp, synthetic construct
  source 1..20: mol_type = other DNA
tgtcacatatctctgcactg

SEQ ID NO: 40576 - DNA, 20 bp, synthetic construct
  source 1..20: mol_type = other DNA
ttgtcacatatctctgcact

SEQ ID NO: 40577 - DNA, 20 bp, synthetic construct
  source 1..20: mol_type = other DNA
cttgtcacatatctctgcac

SEQ ID NO: 40578 - DNA, 20 bp, synthetic construct
  source 1..20: mol_type = other DNA
ccttgtcacatatctctgca

SEQ ID NO: 40579 - DNA, 20 bp, synthetic construct
  source 1..20: mol_type = other DNA
gccttgtcacatatctctgc

SEQ ID NO: 40580 - DNA, 20 bp, synthetic construct
  source 1..20: mol_type = other DNA
ggccttgtcacatatctctg

SEQ ID NO: 40581 - DNA, 20 bp, synthetic construct
  source 1..20: mol_type = other DNA
gggccttgtcacatatctct

SEQ ID NO: 40582 - DNA, 20 bp, synthetic construct
  source 1..20: mol_type = other DNA
ggggccttgtcacatatctc

SEQ ID NO: 40583 - DNA, 20 bp, synthetic construct
  source 1..20: mol_type = other DNA
aggggccttgtcacatatct

SEQ ID NO: 40584 - DNA, 20 bp, synthetic construct
  source 1..20: mol_type = other DNA
aaggggccttgtcacatatc

SEQ ID NO: 40585 - DNA, 20 bp, synthetic construct
  source 1..20: mol_type = other DNA
ctattgtctaggctctgctt

SEQ ID NO: 40586 - DNA, 20 bp, synthetic construct
  source 1..20: mol_type = other DNA
actattgtctaggctctgct

SEQ ID NO: 40587 - DNA, 20 bp, synthetic construct
  source 1..20: mol_type = other DNA
aactattgtctaggctctgc

SEQ ID NO: 40588 - DNA, 20 bp, synthetic construct
  source 1..20: mol_type = other DNA
taactattgtctaggctctg

SEQ ID NO: 40589 - DNA, 20 bp, synthetic construct
  source 1..20: mol_type = other DNA
gtaactattgtctaggctct

SEQ ID NO: 40590 - DNA, 20 bp, synthetic construct
  source 1..20: mol_type = other DNA
tgtaactattgtctaggctc

SEQ ID NO: 40591 - DNA, 20 bp, synthetic construct
  source 1..20: mol_type = other DNA
ggtgatgtaactattgtcta

SEQ ID NO: 40592 - DNA, 20 bp, synthetic construct
  source 1..20: mol_type = other DNA
aggtgatgtaactattgtct

SEQ ID NO: 40593 - DNA, 20 bp, synthetic construct
  source 1..20: mol_type = other DNA
caggtgatgtaactattgtc

SEQ ID NO: 40594 - DNA, 20 bp, synthetic construct
  source 1..20: mol_type = other DNA
tcaggtgatgtaactattgt

SEQ ID NO: 40595 - DNA, 20 bp, synthetic construct
  source 1..20: mol_type = other DNA
ctcaggtgatgtaactattg

SEQ ID NO: 40596 - DNA, 20 bp, synthetic construct
  source 1..20: mol_type = other DNA
actcaggtgatgtaactatt

SEQ ID NO: 40597 - DNA, 20 bp, synthetic construct
  source 1..20: mol_type = other DNA
cactcaggtgatgtaactat

SEQ ID NO: 40598 - DNA, 20 bp, synthetic construct
  source 1..20: mol_type = other DNA
tcactcaggtgatgtaacta

SEQ ID NO: 40599 - DNA, 20 bp, synthetic construct
  source 1..20: mol_type = other DNA
atcactcaggtgatgtaact

SEQ ID NO: 40600 - DNA, 20 bp, synthetic construct
  source 1..20: mol_type = other DNA
gatcactcaggtgatgtaac

SEQ ID NO: 40601 - DNA, 20 bp, synthetic construct
  source 1..20: mol_type = other DNA
tgatcactcaggtgatgtaa

SEQ ID NO: 40602 - DNA, 20 bp, synthetic construct
  source 1..20: mol_type = other DNA
ctgatcactcaggtgatgta

SEQ ID NO: 40603 - DNA, 20 bp, synthetic construct
  source 1..20: mol_type = other DNA
actgatcactcaggtgatgt

SEQ ID NO: 40604 - DNA, 20 bp, synthetic construct
  source 1..20: mol_type = other DNA
cactgatcactcaggtgatg

SEQ ID NO: 40605 - DNA, 20 bp, synthetic construct
  source 1..20: mol_type = other DNA
gcactgatcactcaggtgat

SEQ ID NO: 40606 - DNA, 20 bp, synthetic construct
  source 1..20: mol_type = other DNA
tgcactgatcactcaggtga

SEQ ID NO: 40607 - DNA, 20 bp, synthetic construct
  source 1..20: mol_type = other DNA
ctgcactgatcactcaggtg

SEQ ID NO: 40608 - DNA, 20 bp, synthetic construct
  source 1..20: mol_type = other DNA
tctgcactgatcactcaggt

SEQ ID NO: 40609 - DNA, 20 bp, synthetic construct
  source 1..20: mol_type = other DNA
ctctgcactgatcactcagg

SEQ ID NO: 40610 - DNA, 20 bp, synthetic construct
  source 1..20: mol_type = other DNA
tctctgcactgatcactcag

SEQ ID NO: 40611 - DNA, 20 bp, synthetic construct
  source 1..20: mol_type = other DNA
atctctgcactgatcactca

SEQ ID NO: 40612 - DNA, 20 bp, synthetic construct
  source 1..20: mol_type = other DNA
gatctctgcactgatcactc

SEQ ID NO: 40613 - DNA, 20 bp, synthetic construct
  source 1..20: mol_type = other DNA
agatctctgcactgatcact

SEQ ID NO: 40614 - DNA, 20 bp, synthetic construct
  source 1..20: mol_type = other DNA
cagatctctgcactgatcac

SEQ ID NO: 40615 - DNA, 20 bp, synthetic construct
  source 1..20: mol_type = other DNA
acagatctctgcactgatca

SEQ ID NO: 40616 - DNA, 20 bp, synthetic construct
  source 1..20: mol_type = other DNA
gacagatctctgcactgatc

SEQ ID NO: 40617 - DNA, 20 bp, synthetic construct
  source 1..20: mol_type = other DNA
tgacagatctctgcactgat

SEQ ID NO: 40618 - DNA, 20 bp, synthetic construct
  source 1..20: mol_type = other DNA
gtgacagatctctgcactga

SEQ ID NO: 40619 - DNA, 20 bp, synthetic construct
  source 1..20: mol_type = other DNA
tgtgacagatctctgcactg

SEQ ID NO: 40620 - DNA, 20 bp, synthetic construct
  source 1..20: mol_type = other DNA
ttgtgacagatctctgcact

SEQ ID NO: 40621 - DNA, 20 bp, synthetic construct
  source 1..20: mol_type = other DNA
attgtgacagatctctgcac

SEQ ID NO: 40622 - DNA, 20 bp, synthetic construct
  source 1..20: mol_type = other DNA
cattgtgacagatctctgca

SEQ ID NO: 40623 - DNA, 20 bp, synthetic construct
  source 1..20: mol_type = other DNA
gcattgtgacagatctctgc

SEQ ID NO: 40624 - DNA, 20 bp, synthetic construct
  source 1..20: mol_type = other DNA
ggcattgtgacagatctctg

SEQ ID NO: 40625 - DNA, 20 bp, synthetic construct
  source 1..20: mol_type = other DNA
aaggggcattgtgacagatc

SEQ ID NO: 40626 - DNA, 20 bp, synthetic construct
  source 1..20: mol_type = other DNA
aaaggggcattgtgacagat

SEQ ID NO: 40627 - DNA, 20 bp, synthetic construct
  source 1..20: mol_type = other DNA
taaaggggcattgtgacaga

SEQ ID NO: 40628 - DNA, 20 bp, synthetic construct
  source 1..20: mol_type = other DNA
ctaaaggggcattgtgacag

SEQ ID NO: 40629 - DNA, 20 bp, synthetic construct
  source 1..20: mol_type = other DNA
cctaaaggggcattgtgaca

SEQ ID NO: 40630 - DNA, 20 bp, synthetic construct
  source 1..20: mol_type = other DNA
gcctaaaggggcattgtgac

SEQ ID NO: 40631 - DNA, 20 bp, synthetic construct
  source 1..20: mol_type = other DNA
tgcctaaaggggcattgtga

SEQ ID NO: 40632 - DNA, 20 bp, synthetic construct
  source 1..20: mol_type = other DNA
ctgcctaaaggggcattgtg

SEQ ID NO: 40633 - DNA, 20 bp, synthetic construct
  source 1..20: mol_type = other DNA
tctgcctaaaggggcattgt

SEQ ID NO: 40634 - DNA, 20 bp, synthetic construct
  source 1..20: mol_type = other DNA
ctctgcctaaaggggcattg

SEQ ID NO: 40635 - DNA, 20 bp, synthetic construct
  source 1..20: mol_type = other DNA
gctctgcctaaaggggcatt

SEQ ID NO: 40636 - DNA, 20 bp, synthetic construct
  source 1..20: mol_type = other DNA
agctctgcctaaaggggcat

SEQ ID NO: 40637 - DNA, 20 bp, synthetic construct
  source 1..20: mol_type = other DNA
aagctctgcctaaaggggca

SEQ ID NO: 40638 - DNA, 20 bp, synthetic construct
  source 1..20: mol_type = other DNA
taagctctgcctaaaggggc

SEQ ID NO: 40639 - DNA, 20 bp, synthetic construct
  source 1..20: mol_type = other DNA
ttaagctctgcctaaagggg

SEQ ID NO: 40640 - DNA, 20 bp, synthetic construct
  source 1..20: mol_type = other DNA
tttaagctctgcctaaaggg

SEQ ID NO: 40641 - DNA, 20 bp, synthetic construct
  source 1..20: mol_type = other DNA
gtttaagctctgcctaaagg

SEQ ID NO: 40642 - DNA, 20 bp, synthetic construct
  source 1..20: mol_type = other DNA
cactgatcacacaggtgatg

SEQ ID NO: 40643 - DNA, 20 bp, synthetic construct
  source 1..20: mol_type = other DNA
acatatttctgcactgatca

SEQ ID NO: 40644 - DNA, 20 bp, synthetic construct
  source 1..20: mol_type = other DNA
ctaagctctgcctaaagggg

SEQ ID NO: 40645 - DNA, 20 bp, synthetic construct
  source 1..20: mol_type = other DNA
tctaagctctgcctaaaggg

SEQ ID NO: 40646 - DNA, 20 bp, synthetic construct
  source 1..20: mol_type = other DNA
gtctaagctctgcctaaagg

SEQ ID NO: 40647 - DNA, 20 bp, synthetic construct
  source 1..20: mol_type = other DNA
agtctaagctctgcctaaag

SEQ ID NO: 40648 - DNA, 20 bp, synthetic construct
  source 1..20: mol_type = other DNA
tagtctaagctctgcctaaa

SEQ ID NO: 40649 - DNA, 20 bp, synthetic construct
  source 1..20: mol_type = other DNA
ctagtctaagctctgcctaa

SEQ ID NO: 40650 - DNA, 20 bp, synthetic construct
  source 1..20: mol_type = other DNA
tctagtctaagctctgccta

SEQ ID NO: 40651 - DNA, 20 bp, synthetic construct
  source 1..20: mol_type = other DNA
ctctagtctaagctctgcct

SEQ ID NO: 40652 - DNA, 20 bp, synthetic construct
  source 1..20: mol_type = other DNA
actctagtctaagctctgcc

SEQ ID NO: 40653 - DNA, 20 bp, synthetic construct
  source 1..20: mol_type = other DNA
aactctagtctaagctctgc

SEQ ID NO: 40654 - DNA, 20 bp, synthetic construct
  source 1..20: mol_type = other DNA
taactctagtctaagctctg

SEQ ID NO: 40655 - DNA, 20 bp, synthetic construct
  source 1..20: mol_type = other DNA
gtaactctagtctaagctct

SEQ ID NO: 40656 - DNA, 20 bp, synthetic construct
  source 1..20: mol_type = other DNA
tgtaactctagtctaagctc

SEQ ID NO: 40657 - DNA, 20 bp, synthetic construct
  source 1..20: mol_type = other DNA
atgtaactctagtctaagct

SEQ ID NO: 40658 - DNA, 20 bp, synthetic construct
  source 1..20: mol_type = other DNA
gatgtaactctagtctaagc

SEQ ID NO: 40659 - DNA, 20 bp, synthetic construct
  source 1..20: mol_type = other DNA
gtgatgtaactctagtctaa

SEQ ID NO: 40660 - DNA, 20 bp, synthetic construct
  source 1..20: mol_type = other DNA
ggtgatgtaactctagtcta

SEQ ID NO: 40661 - DNA, 20 bp, synthetic construct
  source 1..20: mol_type = other DNA
aggtgatgtaactctagtct

SEQ ID NO: 40662 - DNA, 20 bp, synthetic construct
  source 1..20: mol_type = other DNA
caggtgatgtaactctagtc

SEQ ID NO: 40663 - DNA, 20 bp, synthetic construct
  source 1..20: mol_type = other DNA
ccaggtgatgtaactctagt

SEQ ID NO: 40664 - DNA, 20 bp, synthetic construct
  source 1..20: mol_type = other DNA
cccaggtgatgtaactctag

SEQ ID NO: 40665 - DNA, 20 bp, synthetic construct
  source 1..20: mol_type = other DNA
acccaggtgatgtaactcta

SEQ ID NO: 40666 - DNA, 20 bp, synthetic construct
  source 1..20: mol_type = other DNA
tggatttgcctatgggggca

SEQ ID NO: 40667 - DNA, 20 bp, synthetic construct
  source 1..20: mol_type = other DNA
ttggatttgcctatgggggc

SEQ ID NO: 40668 - DNA, 20 bp, synthetic construct
  source 1..20: mol_type = other DNA
cttggatttgcctatggggg

SEQ ID NO: 40669 - DNA, 20 bp, synthetic construct
  source 1..20: mol_type = other DNA
tcttggatttgcctatgggg

SEQ ID NO: 40670 - DNA, 20 bp, synthetic construct
  source 1..20: mol_type = other DNA
gtcttggatttgcctatggg

SEQ ID NO: 40671 - DNA, 20 bp, synthetic construct
  source 1..20: mol_type = other DNA
tgtcttggatttgcctatgg

SEQ ID NO: 40672 - DNA, 20 bp, synthetic construct
  source 1..20: mol_type = other DNA
ttgtcttggatttgcctatg

SEQ ID NO: 40673 - DNA, 20 bp, synthetic construct
  source 1..20: mol_type = other DNA
cttgtcttggatttgcctat

SEQ ID NO: 40674 - DNA, 20 bp, synthetic construct
  source 1..20: mol_type = other DNA
tcttgtcttggatttgccta

SEQ ID NO: 40675 - DNA, 20 bp, synthetic construct
  source 1..20: mol_type = other DNA
ctcttgtcttggatttgcct

SEQ ID NO: 40676 - DNA, 20 bp, synthetic construct
  source 1..20: mol_type = other DNA
actcttgtcttggatttgcc

SEQ ID NO: 40677 - DNA, 20 bp, synthetic construct
  source 1..20: mol_type = other DNA
gactcttgtcttggatttgc

SEQ ID NO: 40678 - DNA, 20 bp, synthetic construct
  source 1..20: mol_type = other DNA
agactcttgtcttggatttg

SEQ ID NO: 40679 - DNA, 20 bp, synthetic construct
  source 1..20: mol_type = other DNA
cagactcttgtcttggattt

SEQ ID NO: 40680 - DNA, 20 bp, synthetic construct
  source 1..20: mol_type = other DNA
acagactcttgtcttggatt

SEQ ID NO: 40681 - DNA, 20 bp, synthetic construct
  source 1..20: mol_type = other DNA
gacatatttctgcactgatc

SEQ ID NO: 40682 - DNA, 20 bp, synthetic construct
  source 1..20: mol_type = other DNA
attgtgacatatttctgcac

SEQ ID NO: 40683 - DNA, 20 bp, synthetic construct
  source 1..20: mol_type = other DNA
cattgtgacatatttctgca

SEQ ID NO: 40684 - DNA, 20 bp, synthetic construct
  source 1..20: mol_type = other DNA
gcattgtgacatatttctgc

SEQ ID NO: 40685 - DNA, 20 bp, synthetic construct
  source 1..20: mol_type = other DNA
ggcattgtgacatatttctg

SEQ ID NO: 40686 - DNA, 20 bp, synthetic construct
  source 1..20: mol_type = other DNA
gggcattgtgacatatttct

SEQ ID NO: 40687 - DNA, 20 bp, synthetic construct
  source 1..20: mol_type = other DNA
ggggcattgtgacatatttc

SEQ ID NO: 40688 - DNA, 20 bp, synthetic construct
  source 1..20: mol_type = other DNA
gggggcattgtgacatattt

SEQ ID NO: 40689 - DNA, 20 bp, synthetic construct
  source 1..20: mol_type = other DNA
tgggggcattgtgacatatt

SEQ ID NO: 40690 - DNA, 20 bp, synthetic construct
  source 1..20: mol_type = other DNA
atgggggcattgtgacatat

SEQ ID NO: 40691 - DNA, 20 bp, synthetic construct
  source 1..20: mol_type = other DNA
gttggatctgcctatggggg

SEQ ID NO: 40692 - DNA, 20 bp, synthetic construct
  source 1..20: mol_type = other DNA
tgttggatctgcctatgggg

SEQ ID NO: 40693 - DNA, 20 bp, synthetic construct
  source 1..20: mol_type = other DNA
gtgttggatctgcctatggg

SEQ ID NO: 40694 - DNA, 20 bp, synthetic construct
  source 1..20: mol_type = other DNA
tgtgttggatctgcctatgg

SEQ ID NO: 40695 - DNA, 20 bp, synthetic construct
  source 1..20: mol_type = other DNA
ttgtgttggatctgcctatg

SEQ ID NO: 40696 - DNA, 20 bp, synthetic construct
  source 1..20: mol_type = other DNA
cttgtgttggatctgcctat

SEQ ID NO: 40697 - DNA, 20 bp, synthetic construct
  source 1..20: mol_type = other DNA
tcttgtgttggatctgccta

SEQ ID NO: 40698 - DNA, 20 bp, synthetic construct
  source 1..20: mol_type = other DNA
ctcttgtgttggatctgcct

SEQ ID NO: 40699 - DNA, 20 bp, synthetic construct
  source 1..20: mol_type = other DNA
actcttgtgttggatctgcc

SEQ ID NO: 40700 - DNA, 20 bp, synthetic construct
  source 1..20: mol_type = other DNA
aactcttgtgttggatctgc

SEQ ID NO: 40701 - DNA, 20 bp, synthetic construct
  source 1..20: mol_type = other DNA
taactcttgtgttggatctg

SEQ ID NO: 40702 - DNA, 20 bp, synthetic construct
  source 1..20: mol_type = other DNA
gtaactcttgtgttggatct

SEQ ID NO: 40703 - DNA, 20 bp, synthetic construct
  source 1..20: mol_type = other DNA
tgtaactcttgtgttggatc

SEQ ID NO: 40704 - DNA, 20 bp, synthetic construct
  source 1..20: mol_type = other DNA
atgtaactcttgtgttggat

SEQ ID NO: 40705 - DNA, 20 bp, synthetic construct
  source 1..20: mol_type = other DNA
gatgtaactcttgtgttgga

SEQ ID NO: 40706 - DNA, 20 bp, synthetic construct
  source 1..20: mol_type = other DNA
tgatgtaactcttgtgttgg

SEQ ID NO: 40707 - DNA, 20 bp, synthetic construct
  source 1..20: mol_type = other DNA
gtgatgtaactcttgtgttg

SEQ ID NO: 40708 - DNA, 20 bp, synthetic construct
  source 1..20: mol_type = other DNA
ggtgatgtaactcttgtgtt

SEQ ID NO: 40709 - DNA, 20 bp, synthetic construct
  source 1..20: mol_type = other DNA
aggtgatgtaactcttgtgt

SEQ ID NO: 40710 - DNA, 20 bp, synthetic construct
  source 1..20: mol_type = other DNA
caggtgatgtaactcttgtg

SEQ ID NO: 40711 - DNA, 20 bp, synthetic construct
  source 1..20: mol_type = other DNA
ttacatatctctgcactgat

SEQ ID NO: 40712 - DNA, 20 bp, synthetic construct
  source 1..20: mol_type = other DNA
gttacatatctctgcactga

SEQ ID NO: 40713 - DNA, 20 bp, synthetic construct
  source 1..20: mol_type = other DNA
tgatcacacaggtgatggaa

SEQ ID NO: 40714 - DNA, 20 bp, synthetic construct
  source 1..20: mol_type = other DNA
ctgatcacacaggtgatgga

SEQ ID NO: 40715 - DNA, 20 bp, synthetic construct
  source 1..20: mol_type = other DNA
actgatcacacaggtgatgg

SEQ ID NO: 40716 - DNA, 20 bp, synthetic construct
  source 1..20: mol_type = other DNA
acactgatcacacaggtgat

SEQ ID NO: 40717 - DNA, 20 bp, synthetic construct
  source 1..20: mol_type = other DNA
tacactgatcacacaggtga

SEQ ID NO: 40718 - DNA, 20 bp, synthetic construct
  source 1..20: mol_type = other DNA
ctacactgatcacacaggtg

SEQ ID NO: 40719 - DNA, 20 bp, synthetic construct
  source 1..20: mol_type = other DNA
tctacactgatcacacaggt

SEQ ID NO: 40720 - DNA, 20 bp, synthetic construct
  source 1..20: mol_type = other DNA
ctctacactgatcacacagg

SEQ ID NO: 40721 - DNA, 20 bp, synthetic construct
  source 1..20: mol_type = other DNA
tctctacactgatcacacag

SEQ ID NO: 40722 - DNA, 20 bp, synthetic construct
  source 1..20: mol_type = other DNA
atctctacactgatcacaca

SEQ ID NO: 40723 - DNA, 20 bp, synthetic construct
  source 1..20: mol_type = other DNA
tatctctacactgatcacac

SEQ ID NO: 40724 - DNA, 20 bp, synthetic construct
  source 1..20: mol_type = other DNA
atatctctacactgatcaca

SEQ ID NO: 40725 - DNA, 20 bp, synthetic construct
  source 1..20: mol_type = other DNA
gcattgtgacatatctctac

SEQ ID NO: 40726 - DNA, 20 bp, synthetic construct
  source 1..20: mol_type = other DNA
ggcattgtgacatatctcta

SEQ ID NO: 40727 - DNA, 20 bp, synthetic construct
  source 1..20: mol_type = other DNA
aggcattgtgacatatctct

SEQ ID NO: 40728 - DNA, 20 bp, synthetic construct
  source 1..20: mol_type = other DNA
gaggcattgtgacatatctc

SEQ ID NO: 40729 - DNA, 20 bp, synthetic construct
  source 1..20: mol_type = other DNA
ggaggcattgtgacatatct

SEQ ID NO: 40730 - DNA, 20 bp, synthetic construct
  source 1..20: mol_type = other DNA
aggaggcattgtgacatatc

SEQ ID NO: 40731 - DNA, 20 bp, synthetic construct
  source 1..20: mol_type = other DNA
caggaggcattgtgacatat

SEQ ID NO: 40732 - DNA, 20 bp, synthetic construct
  source 1..20: mol_type = other DNA
acaggaggcattgtgacata

SEQ ID NO: 40733 - DNA, 20 bp, synthetic construct
  source 1..20: mol_type = other DNA
tacaggaggcattgtgacat

SEQ ID NO: 40734 - DNA, 20 bp, synthetic construct
  source 1..20: mol_type = other DNA
ctacaggaggcattgtgaca

SEQ ID NO: 40735 - DNA, 20 bp, synthetic construct
  source 1..20: mol_type = other DNA
cctacaggaggcattgtgac

SEQ ID NO: 40736 - DNA, 20 bp, synthetic construct
  source 1..20: mol_type = other DNA
gcctacaggaggcattgtga

SEQ ID NO: 40737 - DNA, 20 bp, synthetic construct
  source 1..20: mol_type = other DNA
tgcctacaggaggcattgtg

SEQ ID NO: 40738 - DNA, 20 bp, synthetic construct
  source 1..20: mol_type = other DNA
ctgcctacaggaggcattgt

SEQ ID NO: 40739 - DNA, 20 bp, synthetic construct
  source 1..20: mol_type = other DNA
tctgcctacaggaggcattg

SEQ ID NO: 40740 - DNA, 20 bp, synthetic construct
  source 1..20: mol_type = other DNA
ctctgcctacaggaggcatt

SEQ ID NO: 40741 - DNA, 20 bp, synthetic construct
  source 1..20: mol_type = other DNA
ttagcctctgcctacaggag

SEQ ID NO: 40742 - DNA, 20 bp, synthetic construct
  source 1..20: mol_type = other DNA
tttagcctctgcctacagga

SEQ ID NO: 40743 - DNA, 20 bp, synthetic construct
  source 1..20: mol_type = other DNA
gtttagcctctgcctacagg

SEQ ID NO: 40744 - DNA, 20 bp, synthetic construct
  source 1..20: mol_type = other DNA
tgtttagcctctgcctacag

SEQ ID NO: 40745 - DNA, 20 bp, synthetic construct
  source 1..20: mol_type = other DNA
ttgtttagcctctgcctaca

SEQ ID NO: 40746 - DNA, 20 bp, synthetic construct
  source 1..20: mol_type = other DNA
cttgtttagcctctgcctac

SEQ ID NO: 40747 - DNA, 20 bp, synthetic construct
  source 1..20: mol_type = other DNA
tcttgtttagcctctgccta

SEQ ID NO: 40748 - DNA, 20 bp, synthetic construct
  source 1..20: mol_type = other DNA
aactcttgtttagcctctgc

SEQ ID NO: 40749 - DNA, 20 bp, synthetic construct
  source 1..20: mol_type = other DNA
taactcttgtttagcctctg

SEQ ID NO: 40750 - DNA, 20 bp, synthetic construct
  source 1..20: mol_type = other DNA
gtaactcttgtttagcctct

SEQ ID NO: 40751 - DNA, 20 bp, synthetic construct
  source 1..20: mol_type = other DNA
tgtaactcttgtttagcctc

SEQ ID NO: 40752 - DNA, 20 bp, synthetic construct
  source 1..20: mol_type = other DNA
atgtaactcttgtttagcct

SEQ ID NO: 40753 - DNA, 20 bp, synthetic construct
  source 1..20: mol_type = other DNA
gatgtaactcttgtttagcc

SEQ ID NO: 40754 - DNA, 20 bp, synthetic construct
  source 1..20: mol_type = other DNA
tgatgtaactcttgtttagc

SEQ ID NO: 40755 - DNA, 20 bp, synthetic construct
  source 1..20: mol_type = other DNA
gtgatgtaactcttgtttag

SEQ ID NO: 40756 - DNA, 20 bp, synthetic construct
  source 1..20: mol_type = other DNA
ggtgatgtaactcttgttta

SEQ ID NO: 40757 - DNA, 20 bp, synthetic construct
  source 1..20: mol_type = other DNA
aggtgatgtaactcttgttt

SEQ ID NO: 40758 - DNA, 20 bp, synthetic construct
  source 1..20: mol_type = other DNA
caggtgatgtaactcttgtt

SEQ ID NO: 40759 - DNA, 20 bp, synthetic construct
  source 1..20: mol_type = other DNA
tccaggtgatgtaactcttg

SEQ ID NO: 40760 - DNA, 20 bp, synthetic construct
  source 1..20: mol_type = other DNA
atccaggtgatgtaactctt

SEQ ID NO: 40761 - DNA, 20 bp, synthetic construct
  source 1..20: mol_type = other DNA
aatccaggtgatgtaactct

SEQ ID NO: 40762 - DNA, 20 bp, synthetic construct
  source 1..20: mol_type = other DNA
aaatccaggtgatgtaactc

SEQ ID NO: 40763 - DNA, 20 bp, synthetic construct
  source 1..20: mol_type = other DNA
aaaatccaggtgatgtaact

SEQ ID NO: 40764 - DNA, 20 bp, synthetic construct
  source 1..20: mol_type = other DNA
gcaggaaacaaaatccaggt

SEQ ID NO: 40765 - DNA, 20 bp, synthetic construct
  source 1..20: mol_type = other DNA
tgcaggaaacaaaatccagg

SEQ ID NO: 40766 - DNA, 20 bp, synthetic construct
  source 1..20: mol_type = other DNA
gtgacatattgcaggaaaca

SEQ ID NO: 40767 - DNA, 20 bp, synthetic construct
  source 1..20: mol_type = other DNA
tgtgacatattgcaggaaac

SEQ ID NO: 40768 - DNA, 20 bp, synthetic construct
  source 1..20: mol_type = other DNA
ttgtgacatattgcaggaaa

SEQ ID NO: 40769 - DNA, 20 bp, synthetic construct
  source 1..20: mol_type = other DNA
attgtgacatattgcaggaa

SEQ ID NO: 40770 - DNA, 20 bp, synthetic construct
  source 1..20: mol_type = other DNA
cattgtgacatattgcagga

SEQ ID NO: 40771 - DNA, 20 bp, synthetic construct
  source 1..20: mol_type = other DNA
ccattgtgacatattgcagg

SEQ ID NO: 40772 - DNA, 20 bp, synthetic construct
  source 1..20: mol_type = other DNA
gccattgtgacatattgcag

SEQ ID NO: 40773 - DNA, 20 bp, synthetic construct
  source 1..20: mol_type = other DNA
agcctaagcctaacccctaa

SEQ ID NO: 40774 - DNA, 20 bp, synthetic construct
  source 1..20: mol_type = other DNA
aagcctaagcctaaccccta

SEQ ID NO: 40775 - DNA, 20 bp, synthetic construct
  source 1..20: mol_type = other DNA
taagcctaagcctaacccct

SEQ ID NO: 40776 - DNA, 20 bp, synthetic construct
  source 1..20: mol_type = other DNA
ctaagcctaagcctaacccc

SEQ ID NO: 40777 - DNA, 20 bp, synthetic construct
  source 1..20: mol_type = other DNA
cctaagcctaagcctaaccc

SEQ ID NO: 40778 - DNA, 20 bp, synthetic construct
  source 1..20: mol_type = other DNA
ccctaagcctaagcctaacc

SEQ ID NO: 40779 - DNA, 20 bp, synthetic construct
  source 1..20: mol_type = other DNA
accctaagcctaagcctaac

SEQ ID NO: 40780 - DNA, 20 bp, synthetic construct
  source 1..20: mol_type = other DNA
aaccctaagcctaagcctaa

SEQ ID NO: 40781 - DNA, 20 bp, synthetic construct
  source 1..20: mol_type = other DNA
taaccctaagcctaagccta

SEQ ID NO: 40782 - DNA, 20 bp, synthetic construct
  source 1..20: mol_type = other DNA
ctaaccctaagcctaagcct

SEQ ID NO: 40783 - DNA, 20 bp, synthetic construct
  source 1..20: mol_type = other DNA
cctaaccctaagcctaagcc

SEQ ID NO: 40784 - DNA, 20 bp, synthetic construct
  source 1..20: mol_type = other DNA
gcctaaccctaagcctaagc

SEQ ID NO: 40785 - DNA, 20 bp, synthetic construct
  source 1..20: mol_type = other DNA
agcctaaccctaagcctaag

SEQ ID NO: 40786 - DNA, 20 bp, synthetic construct
  source 1..20: mol_type = other DNA
aagcctaaccctaagcctaa

SEQ ID NO: 40787 - DNA, 20 bp, synthetic construct
  source 1..20: mol_type = other DNA
taagcctaaccctaagccta

SEQ ID NO: 40788 - DNA, 20 bp, synthetic construct
  source 1..20: mol_type = other DNA
ctaagcctaaccctaagcct

SEQ ID NO: 40789 - DNA, 20 bp, synthetic construct
  source 1..20: mol_type = other DNA
cctaagcctaaccctaagcc

SEQ ID NO: 40790 - DNA, 20 bp, synthetic construct
  source 1..20: mol_type = other DNA
gcctaagcctaaccctaagc

SEQ ID NO: 40791 - DNA, 20 bp, synthetic construct
  source 1..20: mol_type = other DNA
agcctaagcctaaccctaag

SEQ ID NO: 40792 - DNA, 20 bp, synthetic construct
  source 1..20: mol_type = other DNA
aagcctaagcctaaccctaa

SEQ ID NO: 40793 - DNA, 20 bp, synthetic construct
  source 1..20: mol_type = other DNA
taagcctaagcctaacccta

SEQ ID NO: 40794 - DNA, 20 bp, synthetic construct
  source 1..20: mol_type = other DNA
ctaagcctaagcctaaccct

SEQ ID NO: 40795 - DNA, 20 bp, synthetic construct
  source 1..20: mol_type = other DNA
taccctaagcctaagcctaa

SEQ ID NO: 40796 - DNA, 20 bp, synthetic construct
  source 1..20: mol_type = other DNA
ttaccctaagcctaagccta

SEQ ID NO: 40797 - DNA, 20 bp, synthetic construct
  source 1..20: mol_type = other DNA
cttaccctaagcctaagcct

SEQ ID NO: 40798 - DNA, 20 bp, synthetic construct
  source 1..20: mol_type = other DNA
ccttaccctaagcctaagcc

SEQ ID NO: 40799 - DNA, 20 bp, synthetic construct
  source 1..20: mol_type = other DNA
gccttaccctaagcctaagc

SEQ ID NO: 40800 - DNA, 20 bp, synthetic construct
  source 1..20: mol_type = other DNA
agccttaccctaagcctaag

SEQ ID NO: 40801 - DNA, 20 bp, synthetic construct
  source 1..20: mol_type = other DNA
aagccttaccctaagcctaa

SEQ ID NO: 40802 - DNA, 20 bp, synthetic construct
  source 1..20: mol_type = other DNA
taagccttaccctaagccta

SEQ ID NO: 40803 - DNA, 20 bp, synthetic construct
  source 1..20: mol_type = other DNA
ctaagccttaccctaagcct

SEQ ID NO: 40804 - DNA, 20 bp, synthetic construct
  source 1..20: mol_type = other DNA
cctaagccttaccctaagcc

SEQ ID NO: 40805 - DNA, 20 bp, synthetic construct
  source 1..20: mol_type = other DNA
ccctaagccttaccctaagc

SEQ ID NO: 40806 - DNA, 20 bp, synthetic construct
  source 1..20: mol_type = other DNA
accctaagccttaccctaag

SEQ ID NO: 40807 - DNA, 20 bp, synthetic construct
  source 1..20: mol_type = other DNA
aaccctaagccttaccctaa

SEQ ID NO: 40808 - DNA, 20 bp, synthetic construct
  source 1..20: mol_type = other DNA
gaaccctaagccttacccta

SEQ ID NO: 40809 - DNA, 20 bp, synthetic construct
  source 1..20: mol_type = other DNA
tgaaccctaagccttaccct

SEQ ID NO: 40810 - DNA, 20 bp, synthetic construct
  source 1..20: mol_type = other DNA
ctgaaccctaagccttaccc

SEQ ID NO: 40811 - DNA, 20 bp, synthetic construct
  source 1..20: mol_type = other DNA
cctgaaccctaagccttacc

SEQ ID NO: 40812 - DNA, 20 bp, synthetic construct
  source 1..20: mol_type = other DNA
acctgaaccctaagccttac

SEQ ID NO: 40813 - DNA, 20 bp, synthetic construct
  source 1..20: mol_type = other DNA
gtcttaatagcctatatatt

SEQ ID NO: 40814 - DNA, 20 bp, synthetic construct
  source 1..20: mol_type = other DNA
tgtcttaatagcctatatat

SEQ ID NO: 40815 - DNA, 20 bp, synthetic construct
  source 1..20: mol_type = other DNA
atgtcttaatagcctatata

SEQ ID NO: 40816 - DNA, 20 bp, synthetic construct
  source 1..20: mol_type = other DNA
catgtcttaatagcctatat

SEQ ID NO: 40817 - DNA, 20 bp, synthetic construct
  source 1..20: mol_type = other DNA
acatgtcttaatagcctata

SEQ ID NO: 40818 - DNA, 20 bp, synthetic construct
  source 1..20: mol_type = other DNA
aacatgtcttaatagcctat

SEQ ID NO: 40819 - DNA, 20 bp, synthetic construct
  source 1..20: mol_type = other DNA
aaacatgtcttaatagccta

SEQ ID NO: 40820 - DNA, 20 bp, synthetic construct
  source 1..20: mol_type = other DNA
caaacatgtcttaatagcct

SEQ ID NO: 40821 - DNA, 20 bp, synthetic construct
  source 1..20: mol_type = other DNA
acaaacatgtcttaatagcc

SEQ ID NO: 40822 - DNA, 20 bp, synthetic construct
  source 1..20: mol_type = other DNA
gccattctttgaagacaaac

SEQ ID NO: 40823 - DNA, 20 bp, synthetic construct
  source 1..20: mol_type = other DNA
ggccattctttgaagacaaa

SEQ ID NO: 40824 - DNA, 20 bp, synthetic construct
  source 1..20: mol_type = other DNA
aggccattctttgaagacaa

SEQ ID NO: 40825 - DNA, 20 bp, synthetic construct
  source 1..20: mol_type = other DNA
aaggccattctttgaagaca

SEQ ID NO: 40826 - DNA, 20 bp, synthetic construct
  source 1..20: mol_type = other DNA
caaggccattctttgaagac

SEQ ID NO: 40827 - DNA, 20 bp, synthetic construct
  source 1..20: mol_type = other DNA
ccaaggccattctttgaaga

SEQ ID NO: 40828 - DNA, 20 bp, synthetic construct
  source 1..20: mol_type = other DNA
accaaggccattctttgaag

SEQ ID NO: 40829 - DNA, 20 bp, synthetic construct
  source 1..20: mol_type = other DNA
aaccaaggccattctttgaa

SEQ ID NO: 40830 - DNA, 20 bp, synthetic construct
  source 1..20: mol_type = other DNA
aaaccaaggccattctttga

SEQ ID NO: 40831 - DNA, 20 bp, synthetic construct
  source 1..20: mol_type = other DNA
gaaaccaaggccattctttg

SEQ ID NO: 40832 - DNA, 20 bp, synthetic construct
  source 1..20: mol_type = other DNA
agaaaccaaggccattcttt

SEQ ID NO: 40833 - DNA, 20 bp, synthetic construct
  source 1..20: mol_type = other DNA
cagaaaccaaggccattctt

SEQ ID NO: 40834 - DNA, 20 bp, synthetic construct
  source 1..20: mol_type = other DNA
acagaaaccaaggccattct

SEQ ID NO: 40835 - DNA, 20 bp, synthetic construct
  source 1..20: mol_type = other DNA
cacagaaaccaaggccattc

SEQ ID NO: 40836 - DNA, 20 bp, synthetic construct
  source 1..20: mol_type = other DNA
ccacagaaaccaaggccatt

SEQ ID NO: 40837 - DNA, 20 bp, synthetic construct
  source 1..20: mol_type = other DNA
tccacagaaaccaaggccat

SEQ ID NO: 40838 - DNA, 20 bp, synthetic construct
  source 1..20: mol_type = other DNA
gtccacagaaaccaaggcca

SEQ ID NO: 40839 - DNA, 20 bp, synthetic construct
  source 1..20: mol_type = other DNA
tgtccacagaaaccaaggcc

SEQ ID NO: 40840 - DNA, 20 bp, synthetic construct
  source 1..20: mol_type = other DNA
ctgtccacagaaaccaaggc

SEQ ID NO: 40841 - DNA, 20 bp, synthetic construct
  source 1..20: mol_type = other DNA
actgtccacagaaaccaagg

SEQ ID NO: 40842 - DNA, 20 bp, synthetic construct
  source 1..20: mol_type = other DNA
aactgtccacagaaaccaag

SEQ ID NO: 40843 - DNA, 20 bp, synthetic construct
  source 1..20: mol_type = other DNA
aaactgtccacagaaaccaa

SEQ ID NO: 40844 - DNA, 20 bp, synthetic construct
  source 1..20: mol_type = other DNA
gaaactgtccacagaaacca

SEQ ID NO: 40845 - DNA, 20 bp, synthetic construct
  source 1..20: mol_type = other DNA
agaaactgtccacagaaacc

SEQ ID NO: 40846 - DNA, 20 bp, synthetic construct
  source 1..20: mol_type = other DNA
gagaaactgtccacagaaac

SEQ ID NO: 40847 - DNA, 20 bp, synthetic construct
  source 1..20: mol_type = other DNA
ggagaaactgtccacagaaa

SEQ ID NO: 40848 - DNA, 20 bp, synthetic construct
  source 1..20: mol_type = other DNA
aggagaaactgtccacagaa

SEQ ID NO: 40849 - DNA, 20 bp, synthetic construct
  source 1..20: mol_type = other DNA
gaggagaaactgtccacaga

SEQ ID NO: 40850 - DNA, 20 bp, synthetic construct
  source 1..20: mol_type = other DNA
tgaggagaaactgtccacag

SEQ ID NO: 40851 - DNA, 20 bp, synthetic construct
  source 1..20: mol_type = other DNA
atgaggagaaactgtccaca

SEQ ID NO: 40852 - DNA, 20 bp, synthetic construct
  source 1..20: mol_type = other DNA
catgaggagaaactgtccac

SEQ ID NO: 40853 - DNA, 20 bp, synthetic construct
  source 1..20: mol_type = other DNA
ccatgaggagaaactgtcca

SEQ ID NO: 40854 - DNA, 20 bp, synthetic construct
  source 1..20: mol_type = other DNA
tccatgaggagaaactgtcc

SEQ ID NO: 40855 - DNA, 20 bp, synthetic construct
  source 1..20: mol_type = other DNA
ttccatgaggagaaactgtc

SEQ ID NO: 40856 - DNA, 20 bp, synthetic construct
  source 1..20: mol_type = other DNA
tttccatgaggagaaactgt

SEQ ID NO: 40857 - DNA, 20 bp, synthetic construct
  source 1..20: mol_type = other DNA
ctttccatgaggagaaactg

SEQ ID NO: 40858 - DNA, 20 bp, synthetic construct
  source 1..20: mol_type = other DNA
cctttccatgaggagaaact

SEQ ID NO: 40859 - DNA, 20 bp, synthetic construct
  source 1..20: mol_type = other DNA
acctttccatgaggagaaac

SEQ ID NO: 40860 - DNA, 20 bp, synthetic construct
  source 1..20: mol_type = other DNA
tacctttccatgaggagaaa

SEQ ID NO: 40861 - DNA, 20 bp, synthetic construct
  source 1..20: mol_type = other DNA
ctacctttccatgaggagaa

SEQ ID NO: 40862 - DNA, 20 bp, synthetic construct
  source 1..20: mol_type = other DNA
actacctttccatgaggaga

SEQ ID NO: 40863 - DNA, 20 bp, synthetic construct
  source 1..20: mol_type = other DNA
cactacctttccatgaggag

SEQ ID NO: 40864 - DNA, 20 bp, synthetic construct
  source 1..20: mol_type = other DNA
acactacctttccatgagga

SEQ ID NO: 40865 - DNA, 20 bp, synthetic construct
  source 1..20: mol_type = other DNA
cacactacctttccatgagg

SEQ ID NO: 40866 - DNA, 20 bp, synthetic construct
  source 1..20: mol_type = other DNA
acacactacctttccatgag

SEQ ID NO: 40867 - DNA, 20 bp, synthetic construct
  source 1..20: mol_type = other DNA
aacacactacctttccatga

SEQ ID NO: 40868 - DNA, 20 bp, synthetic construct
  source 1..20: mol_type = other DNA
gaacacactacctttccatg

SEQ ID NO: 40869 - DNA, 20 bp, synthetic construct
  source 1..20: mol_type = other DNA
ggaacacactacctttccat

SEQ ID NO: 40870 - DNA, 20 bp, synthetic construct
  source 1..20: mol_type = other DNA
aggaacacactacctttcca

SEQ ID NO: 40871 - DNA, 20 bp, synthetic construct
  source 1..20: mol_type = other DNA
caggaacacactacctttcc

SEQ ID NO: 40872 - DNA, 20 bp, synthetic construct
  source 1..20: mol_type = other DNA
gcaggaacacactacctttc

SEQ ID NO: 40873 - DNA, 20 bp, synthetic construct
  source 1..20: mol_type = other DNA
agcaggaacacactaccttt

SEQ ID NO: 40874 - DNA, 20 bp, synthetic construct
  source 1..20: mol_type = other DNA
tagcaggaacacactacctt

SEQ ID NO: 40875 - DNA, 20 bp, synthetic construct
  source 1..20: mol_type = other DNA
ttagcaggaacacactacct

SEQ ID NO: 40876 - DNA, 20 bp, synthetic construct
  source 1..20: mol_type = other DNA
tttagcaggaacacactacc

SEQ ID NO: 40877 - DNA, 20 bp, synthetic construct
  source 1..20: mol_type = other DNA
aaaagcatttagctttctgg

SEQ ID NO: 40878 - DNA, 20 bp, synthetic construct
  source 1..20: mol_type = other DNA
ttgtgatttgtatttagtga

SEQ ID NO: 40879 - DNA, 20 bp, synthetic construct
  source 1..20: mol_type = other DNA
gttgtgatttgtatttagtg

SEQ ID NO: 40880 - DNA, 20 bp, synthetic construct
  source 1..20: mol_type = other DNA
agttgtgatttgtatttagt

SEQ ID NO: 40881 - DNA, 20 bp, synthetic construct
  source 1..20: mol_type = other DNA
gagttgtgatttgtatttag

SEQ ID NO: 40882 - DNA, 20 bp, synthetic construct
  source 1..20: mol_type = other DNA
agagttgtgatttgtattta

SEQ ID NO: 40883 - DNA, 20 bp, synthetic construct
  source 1..20: mol_type = other DNA
tgttgtgtgtgtaatgagaa

SEQ ID NO: 40884 - DNA, 20 bp, synthetic construct
  source 1..20: mol_type = other DNA
ttgttgtgtgtgtaatgaga

SEQ ID NO: 40885 - DNA, 20 bp, synthetic construct
  source 1..20: mol_type = other DNA
tttgttgtgtgtgtaatgag

SEQ ID NO: 40886 - DNA, 20 bp, synthetic construct
  source 1..20: mol_type = other DNA
ttttgttgtgtgtgtaatga

SEQ ID NO: 40887 - DNA, 20 bp, synthetic construct
  source 1..20: mol_type = other DNA
attttgttgtgtgtgtaatg

SEQ ID NO: 40888 - DNA, 20 bp, synthetic construct
  source 1..20: mol_type = other DNA
aattttgttgtgtgtgtaat

SEQ ID NO: 40889 - DNA, 20 bp, synthetic construct
  source 1..20: mol_type = other DNA
ctaaattttgttgtgtgtgt

SEQ ID NO: 40890 - DNA, 20 bp, synthetic construct
  source 1..20: mol_type = other DNA
gctaaattttgttgtgtgtg

SEQ ID NO: 40891 - DNA, 20 bp, synthetic construct
  source 1..20: mol_type = other DNA
agctaaattttgttgtgtgt

SEQ ID NO: 40892 - DNA, 20 bp, synthetic construct
  source 1..20: mol_type = other DNA
cagctaaattttgttgtgtg

SEQ ID NO: 40893 - DNA, 20 bp, synthetic construct
  source 1..20: mol_type = other DNA
tcagctaaattttgttgtgt

SEQ ID NO: 40894 - DNA, 20 bp, synthetic construct
  source 1..20: mol_type = other DNA
ctcagctaaattttgttgtg

SEQ ID NO: 40895 - DNA, 20 bp, synthetic construct
  source 1..20: mol_type = other DNA
cctcagctaaattttgttgt

SEQ ID NO: 40896 - DNA, 20 bp, synthetic construct
  source 1..20: mol_type = other DNA
ccctcagctaaattttgttg

SEQ ID NO: 40897 - DNA, 20 bp, synthetic construct
  source 1..20: mol_type = other DNA
tccctcagctaaattttgtt

SEQ ID NO: 40898 - DNA, 20 bp, synthetic construct
  source 1..20: mol_type = other DNA
ctccctcagctaaattttgt

SEQ ID NO: 40899 - DNA, 20 bp, synthetic construct
  source 1..20: mol_type = other DNA
tctccctcagctaaattttg

SEQ ID NO: 40900 - DNA, 20 bp, synthetic construct
  source 1..20: mol_type = other DNA
atctccctcagctaaatttt

SEQ ID NO: 40901 - DNA, 20 bp, synthetic construct
  source 1..20: mol_type = other DNA
aatctccctcagctaaattt

SEQ ID NO: 40902 - DNA, 20 bp, synthetic construct
  source 1..20: mol_type = other DNA
caatctccctcagctaaatt

SEQ ID NO: 40903 - DNA, 20 bp, synthetic construct
  source 1..20: mol_type = other DNA
tcaatctccctcagctaaat

SEQ ID NO: 40904 - DNA, 20 bp, synthetic construct
  source 1..20: mol_type = other DNA
ctcaatctccctcagctaaa

SEQ ID NO: 40905 - DNA, 20 bp, synthetic construct
  source 1..20: mol_type = other DNA
actcaatctccctcagctaa

SEQ ID NO: 40906 - DNA, 20 bp, synthetic construct
  source 1..20: mol_type = other DNA
cactcaatctccctcagcta

SEQ ID NO: 40907 - DNA, 20 bp, synthetic construct
  source 1..20: mol_type = other DNA
tcactcaatctccctcagct

SEQ ID NO: 40908 - DNA, 20 bp, synthetic construct
  source 1..20: mol_type = other DNA
gtcactcaatctccctcagc

SEQ ID NO: 40909 - DNA, 20 bp, synthetic construct
  source 1..20: mol_type = other DNA
agtcactcaatctccctcag

SEQ ID NO: 40910 - DNA, 20 bp, synthetic construct
  source 1..20: mol_type = other DNA
aagtcactcaatctccctca

SEQ ID NO: 40911 - DNA, 20 bp, synthetic construct
  source 1..20: mol_type = other DNA
aaagtcactcaatctccctc

SEQ ID NO: 40912 - DNA, 20 bp, synthetic construct
  source 1..20: mol_type = other DNA
gaaagtcactcaatctccct

SEQ ID NO: 40913 - DNA, 20 bp, synthetic construct
  source 1..20: mol_type = other DNA
ggaaagtcactcaatctccc

SEQ ID NO: 40914 - DNA, 20 bp, synthetic construct
  source 1..20: mol_type = other DNA
gggaaagtcactcaatctcc

SEQ ID NO: 40915 - DNA, 20 bp, synthetic construct
  source 1..20: mol_type = other DNA
tgggaaagtcactcaatctc

SEQ ID NO: 40916 - DNA, 20 bp, synthetic construct
  source 1..20: mol_type = other DNA
ctgggaaagtcactcaatct

SEQ ID NO: 40917 - DNA, 20 bp, synthetic construct
  source 1..20: mol_type = other DNA
cctgggaaagtcactcaatc

SEQ ID NO: 40918 - DNA, 20 bp, synthetic construct
  source 1..20: mol_type = other DNA
ccctgggaaagtcactcaat

SEQ ID NO: 40919 - DNA, 20 bp, synthetic construct
  source 1..20: mol_type = other DNA
accctgggaaagtcactcaa

SEQ ID NO: 40920 - DNA, 20 bp, synthetic construct
  source 1..20: mol_type = other DNA
gaccctgggaaagtcactca

SEQ ID NO: 40921 - DNA, 20 bp, synthetic construct
  source 1..20: mol_type = other DNA
tgaccctgggaaagtcactc

SEQ ID NO: 40922 - DNA, 20 bp, synthetic construct
  source 1..20: mol_type = other DNA
gtgaccctgggaaagtcact

SEQ ID NO: 40923 - DNA, 20 bp, synthetic construct
  source 1..20: mol_type = other DNA
tgtgaccctgggaaagtcac

SEQ ID NO: 40924 - DNA, 20 bp, synthetic construct
  source 1..20: mol_type = other DNA
gtgtgaccctgggaaagtca

SEQ ID NO: 40925 - DNA, 20 bp, synthetic construct
  source 1..20: mol_type = other DNA
tgtgtgaccctgggaaagtc

SEQ ID NO: 40926 - DNA, 20 bp, synthetic construct
  source 1..20: mol_type = other DNA
ctgtgtgaccctgggaaagt

SEQ ID NO: 40927 - DNA, 20 bp, synthetic construct
  source 1..20: mol_type = other DNA
gctgtgtgaccctgggaaag

SEQ ID NO: 40928 - DNA, 20 bp, synthetic construct
  source 1..20: mol_type = other DNA
agctgtgtgaccctgggaaa

SEQ ID NO: 40929 - DNA, 20 bp, synthetic construct
  source 1..20: mol_type = other DNA
tagctgtgtgaccctgggaa

SEQ ID NO: 40930 - DNA, 20 bp, synthetic construct
  source 1..20: mol_type = other DNA
tagtagctgtgtgaccctgg

SEQ ID NO: 40931 - DNA, 20 bp, synthetic construct
  source 1..20: mol_type = other DNA
ttagtagctgtgtgaccctg

SEQ ID NO: 40932 - DNA, 20 bp, synthetic construct
  source 1..20: mol_type = other DNA
attagtagctgtgtgaccct

SEQ ID NO: 40933 - DNA, 20 bp, synthetic construct
  source 1..20: mol_type = other DNA
tattagtagctgtgtgaccc

SEQ ID NO: 40934 - DNA, 20 bp, synthetic construct
  source 1..20: mol_type = other DNA
ctattagtagctgtgtgacc

SEQ ID NO: 40935 - DNA, 20 bp, synthetic construct
  source 1..20: mol_type = other DNA
gctattagtagctgtgtgac

SEQ ID NO: 40936 - DNA, 20 bp, synthetic construct
  source 1..20: mol_type = other DNA
tgctattagtagctgtgtga

SEQ ID NO: 40937 - DNA, 20 bp, synthetic construct
  source 1..20: mol_type = other DNA
ctgctattagtagctgtgtg

SEQ ID NO: 40938 - DNA, 20 bp, synthetic construct
  source 1..20: mol_type = other DNA
tctgctattagtagctgtgt

SEQ ID NO: 40939 - DNA, 20 bp, synthetic construct
  source 1..20: mol_type = other DNA
ctctgctattagtagctgtg

SEQ ID NO: 40940 - DNA, 20 bp, synthetic construct
  source 1..20: mol_type = other DNA
actctgctattagtagctgt

SEQ ID NO: 40941 - DNA, 20 bp, synthetic construct
  source 1..20: mol_type = other DNA
tactctgctattagtagctg

SEQ ID NO: 40942 - DNA, 20 bp, synthetic construct
  source 1..20: mol_type = other DNA
ctactctgctattagtagct

SEQ ID NO: 40943 - DNA, 20 bp, synthetic construct
  source 1..20: mol_type = other DNA
actactctgctattagtagc

SEQ ID NO: 40944 - DNA, 20 bp, synthetic construct
  source 1..20: mol_type = other DNA
cactactctgctattagtag

SEQ ID NO: 40945 - DNA, 20 bp, synthetic construct
  source 1..20: mol_type = other DNA
acactactctgctattagta

SEQ ID NO: 40946 - DNA, 20 bp, synthetic construct
  source 1..20: mol_type = other DNA
aacactactctgctattagt

SEQ ID NO: 40947 - DNA, 20 bp, synthetic construct
  source 1..20: mol_type = other DNA
aaacactactctgctattag

SEQ ID NO: 40948 - DNA, 20 bp, synthetic construct
  source 1..20: mol_type = other DNA
ctaaacactactctgctatt

SEQ ID NO: 40949 - DNA, 20 bp, synthetic construct
  source 1..20: mol_type = other DNA
tctaaacactactctgctat

SEQ ID NO: 40950 - DNA, 20 bp, synthetic construct
  source 1..20: mol_type = other DNA
atctaaacactactctgcta

SEQ ID NO: 40951 - DNA, 20 bp, synthetic construct
  source 1..20: mol_type = other DNA
aatctaaacactactctgct

SEQ ID NO: 40952 - DNA, 20 bp, synthetic construct
  source 1..20: mol_type = other DNA
gaatctaaacactactctgc

SEQ ID NO: 40953 - DNA, 20 bp, synthetic construct
  source 1..20: mol_type = other DNA
cccatatgaatctaaacact

SEQ ID NO: 40954 - DNA, 20 bp, synthetic construct
  source 1..20: mol_type = other DNA
gtattcccatatgaatctaa

SEQ ID NO: 40955 - DNA, 20 bp, synthetic construct
  source 1..20: mol_type = other DNA
agtattcccatatgaatcta

SEQ ID NO: 40956 - DNA, 20 bp, synthetic construct
  source 1..20: mol_type = other DNA
cagtattcccatatgaatct

SEQ ID NO: 40957 - DNA, 20 bp, synthetic construct
  source 1..20: mol_type = other DNA
tcagtattcccatatgaatc

SEQ ID NO: 40958 - DNA, 20 bp, synthetic construct
  source 1..20: mol_type = other DNA
ttcagtattcccatatgaat

SEQ ID NO: 40959 - DNA, 20 bp, synthetic construct
  source 1..20: mol_type = other DNA
gttcagtattcccatatgaa

SEQ ID NO: 40960 - DNA, 20 bp, synthetic construct
  source 1..20: mol_type = other DNA
tgttcagtattcccatatga

SEQ ID NO: 40961 - DNA, 20 bp, synthetic construct
  source 1..20: mol_type = other DNA
gtgttcagtattcccatatg

SEQ ID NO: 40962 - DNA, 20 bp, synthetic construct
  source 1..20: mol_type = other DNA
tgtgttcagtattcccatat

SEQ ID NO: 40963 - DNA, 20 bp, synthetic construct
  source 1..20: mol_type = other DNA
ctgtgttcagtattcccata

SEQ ID NO: 40964 - DNA, 20 bp, synthetic construct
  source 1..20: mol_type = other DNA
tctgtgttcagtattcccat

SEQ ID NO: 40965 - DNA, 20 bp, synthetic construct
  source 1..20: mol_type = other DNA
ttctgtgttcagtattccca

SEQ ID NO: 40966 - DNA, 20 bp, synthetic construct
  source 1..20: mol_type = other DNA
tttctgtgttcagtattccc

SEQ ID NO: 40967 - DNA, 20 bp, synthetic construct
  source 1..20: mol_type = other DNA
atttctgtgttcagtattcc

SEQ ID NO: 40968 - DNA, 20 bp, synthetic construct
  source 1..20: mol_type = other DNA
catttctgtgttcagtattc

SEQ ID NO: 40969 - DNA, 20 bp, synthetic construct
  source 1..20: mol_type = other DNA
tcatttctgtgttcagtatt

SEQ ID NO: 40970 - DNA, 20 bp, synthetic construct
  source 1..20: mol_type = other DNA
ttcatttctgtgttcagtat

SEQ ID NO: 40971 - DNA, 20 bp, synthetic construct
  source 1..20: mol_type = other DNA
gttcatttctgtgttcagta

SEQ ID NO: 40972 - DNA, 20 bp, synthetic construct
  source 1..20: mol_type = other DNA
ggttcatttctgtgttcagt

SEQ ID NO: 40973 - DNA, 20 bp, synthetic construct
  source 1..20: mol_type = other DNA
tggttcatttctgtgttcag

SEQ ID NO: 40974 - DNA, 20 bp, synthetic construct
  source 1..20: mol_type = other DNA
ttggttcatttctgtgttca

SEQ ID NO: 40975 - DNA, 20 bp, synthetic construct
  source 1..20: mol_type = other DNA
attggttcatttctgtgttc

SEQ ID NO: 40976 - DNA, 20 bp, synthetic construct
  source 1..20: mol_type = other DNA
cattggttcatttctgtgtt

SEQ ID NO: 40977 - DNA, 20 bp, synthetic construct
  source 1..20: mol_type = other DNA
ccattggttcatttctgtgt

SEQ ID NO: 40978 - DNA, 20 bp, synthetic construct
  source 1..20: mol_type = other DNA
tccattggttcatttctgtg

SEQ ID NO: 40979 - DNA, 20 bp, synthetic construct
  source 1..20: mol_type = other DNA
ttccattggttcatttctgt

SEQ ID NO: 40980 - DNA, 20 bp, synthetic construct
  source 1..20: mol_type = other DNA
tttccattggttcatttctg

SEQ ID NO: 40981 - DNA, 20 bp, synthetic construct
  source 1..20: mol_type = other DNA
gtttccattggttcatttct

SEQ ID NO: 40982 - DNA, 20 bp, synthetic construct
  source 1..20: mol_type = other DNA
tgtttccattggttcatttc

SEQ ID NO: 40983 - DNA, 20 bp, synthetic construct
  source 1..20: mol_type = other DNA
atgtttccattggttcattt

SEQ ID NO: 40984 - DNA, 20 bp, synthetic construct
  source 1..20: mol_type = other DNA
gatgtttccattggttcatt

SEQ ID NO: 40985 - DNA, 20 bp, synthetic construct
  source 1..20: mol_type = other DNA
ggatgtttccattggttcat

SEQ ID NO: 40986 - DNA, 20 bp, synthetic construct
  source 1..20: mol_type = other DNA
aggatgtttccattggttca

SEQ ID NO: 40987 - DNA, 20 bp, synthetic construct
  source 1..20: mol_type = other DNA
taggatgtttccattggttc

SEQ ID NO: 40988 - DNA, 20 bp, synthetic construct
  source 1..20: mol_type = other DNA
gtaggatgtttccattggtt

SEQ ID NO: 40989 - DNA, 20 bp, synthetic construct
  source 1..20: mol_type = other DNA
cgtaggatgtttccattggt

SEQ ID NO: 40990 - DNA, 20 bp, synthetic construct
  source 1..20: mol_type = other DNA
acgtaggatgtttccattgg

SEQ ID NO: 40991 - DNA, 20 bp, synthetic construct
  source 1..20: mol_type = other DNA
aacgtaggatgtttccattg

SEQ ID NO: 40992 - DNA, 20 bp, synthetic construct
  source 1..20: mol_type = other DNA
gaacgtaggatgtttccatt

SEQ ID NO: 40993 - DNA, 20 bp, synthetic construct
  source 1..20: mol_type = other DNA
ggaacgtaggatgtttccat

SEQ ID NO: 40994 - DNA, 20 bp, synthetic construct
  source 1..20: mol_type = other DNA
tggaacgtaggatgtttcca

SEQ ID NO: 40995 - DNA, 20 bp, synthetic construct
  source 1..20: mol_type = other DNA
ttggaacgtaggatgtttcc

SEQ ID NO: 40996 - DNA, 20 bp, synthetic construct
  source 1..20: mol_type = other DNA
tttggaacgtaggatgtttc

SEQ ID NO: 40997 - DNA, 20 bp, synthetic construct
  source 1..20: mol_type = other DNA
ttttggaacgtaggatgttt

SEQ ID NO: 40998 - DNA, 20 bp, synthetic construct
  source 1..20: mol_type = other DNA
cttttggaacgtaggatgtt

SEQ ID NO: 40999 - DNA, 20 bp, synthetic construct
  source 1..20: mol_type = other DNA
gcttttggaacgtaggatgt

SEQ ID NO: 41000 - DNA, 20 bp, synthetic construct
  source 1..20: mol_type = other DNA
ggcttttggaacgtaggatg

SEQ ID NO: 41001 - DNA, 20 bp, synthetic construct
  source 1..20: mol_type = other DNA
aggcttttggaacgtaggat

SEQ ID NO: 41002 - DNA, 20 bp, synthetic construct
  source 1..20: mol_type = other DNA
taggcttttggaacgtagga

SEQ ID NO: 41003 - DNA, 20 bp, synthetic construct
  source 1..20: mol_type = other DNA
gtaggcttttggaacgtagg

SEQ ID NO: 41004 - DNA, 20 bp, synthetic construct
  source 1..20: mol_type = other DNA
agtaggcttttggaacgtag

SEQ ID NO: 41005 - DNA, 20 bp, synthetic construct
  source 1..20: mol_type = other DNA
gagtaggcttttggaacgta

SEQ ID NO: 41006 - DNA, 20 bp, synthetic construct
  source 1..20: mol_type = other DNA
tgagtaggcttttggaacgt

SEQ ID NO: 41007 - DNA, 20 bp, synthetic construct
  source 1..20: mol_type = other DNA
ttgagtaggcttttggaacg

SEQ ID NO: 41008 - DNA, 20 bp, synthetic construct
  source 1..20: mol_type = other DNA
cttgagtaggcttttggaac

SEQ ID NO: 41009 - DNA, 20 bp, synthetic construct
  source 1..20: mol_type = other DNA
gcttgagtaggcttttggaa

SEQ ID NO: 41010 - DNA, 20 bp, synthetic construct
  source 1..20: mol_type = other DNA
ggcttgagtaggcttttgga

SEQ ID NO: 41011 - DNA, 20 bp, synthetic construct
  source 1..20: mol_type = other DNA
tggcttgagtaggcttttgg

SEQ ID NO: 41012 - DNA, 20 bp, synthetic construct
  source 1..20: mol_type = other DNA
atggcttgagtaggcttttg

SEQ ID NO: 41013 - DNA, 20 bp, synthetic construct
  source 1..20: mol_type = other DNA
aatggcttgagtaggctttt

SEQ ID NO: 41014 - DNA, 20 bp, synthetic construct
  source 1..20: mol_type = other DNA
aaatggcttgagtaggcttt

SEQ ID NO: 41015 - DNA, 20 bp, synthetic construct
  source 1..20: mol_type = other DNA
caaatggcttgagtaggctt

SEQ ID NO: 41016 - DNA, 20 bp, synthetic construct
  source 1..20: mol_type = other DNA
acaaatggcttgagtaggct

SEQ ID NO: 41017 - DNA, 20 bp, synthetic construct
  source 1..20: mol_type = other DNA
aacaaatggcttgagtaggc

SEQ ID NO: 41018 - DNA, 20 bp, synthetic construct
  source 1..20: mol_type = other DNA
gaacaaatggcttgagtagg

SEQ ID NO: 41019 - DNA, 20 bp, synthetic construct
  source 1..20: mol_type = other DNA
cattcataagtatttggagt

SEQ ID NO: 41020 - DNA, 20 bp, synthetic construct
  source 1..20: mol_type = other DNA
ccattcataagtatttggag

SEQ ID NO: 41021 - DNA, 20 bp, synthetic construct
  source 1..20: mol_type = other DNA
gccattcataagtatttgga

SEQ ID NO: 41022 - DNA, 20 bp, synthetic construct
  source 1..20: mol_type = other DNA
tgccattcataagtatttgg

SEQ ID NO: 41023 - DNA, 20 bp, synthetic construct
  source 1..20: mol_type = other DNA
ctgccattcataagtatttg

SEQ ID NO: 41024 - DNA, 20 bp, synthetic construct
  source 1..20: mol_type = other DNA
tctgccattcataagtattt

SEQ ID NO: 41025 - DNA, 20 bp, synthetic construct
  source 1..20: mol_type = other DNA
ctctgccattcataagtatt

SEQ ID NO: 41026 - DNA, 20 bp, synthetic construct
  source 1..20: mol_type = other DNA
tctctgccattcataagtat

SEQ ID NO: 41027 - DNA, 20 bp, synthetic construct
  source 1..20: mol_type = other DNA
atctctgccattcataagta

SEQ ID NO: 41028 - DNA, 20 bp, synthetic construct
  source 1..20: mol_type = other DNA
gatctctgccattcataagt

SEQ ID NO: 41029 - DNA, 20 bp, synthetic construct
  source 1..20: mol_type = other DNA
agatctctgccattcataag

SEQ ID NO: 41030 - DNA, 20 bp, synthetic construct
  source 1..20: mol_type = other DNA
tagatctctgccattcataa

SEQ ID NO: 41031 - DNA, 20 bp, synthetic construct
  source 1..20: mol_type = other DNA
gtagatctctgccattcata

SEQ ID NO: 41032 - DNA, 20 bp, synthetic construct
  source 1..20: mol_type = other DNA
tgtagatctctgccattcat

SEQ ID NO: 41033 - DNA, 20 bp, synthetic construct
  source 1..20: mol_type = other DNA
ctgtagatctctgccattca

SEQ ID NO: 41034 - DNA, 20 bp, synthetic construct
  source 1..20: mol_type = other DNA
tctgtagatctctgccattc

SEQ ID NO: 41035 - DNA, 20 bp, synthetic construct
  source 1..20: mol_type = other DNA
atctgtagatctctgccatt

SEQ ID NO: 41036 - DNA, 20 bp, synthetic construct
  source 1..20: mol_type = other DNA
aatctgtagatctctgccat

SEQ ID NO: 41037 - DNA, 20 bp, synthetic construct
  source 1..20: mol_type = other DNA
aaatctgtagatctctgcca

SEQ ID NO: 41038 - DNA, 20 bp, synthetic construct
  source 1..20: mol_type = other DNA
caaatctgtagatctctgcc

SEQ ID NO: 41039 - DNA, 20 bp, synthetic construct
  source 1..20: mol_type = other DNA
tcaaatctgtagatctctgc

SEQ ID NO: 41040 - DNA, 20 bp, synthetic construct
  source 1..20: mol_type = other DNA
atcaaatctgtagatctctg

SEQ ID NO: 41041 - DNA, 20 bp, synthetic construct
  source 1..20: mol_type = other DNA
catttcttacatcagaatca

SEQ ID NO: 41042 - DNA, 20 bp, synthetic construct
  source 1..20: mol_type = other DNA
tcatttcttacatcagaatc

SEQ ID NO: 41043 - DNA, 20 bp, synthetic construct
  source 1..20: mol_type = other DNA
catcatttcttacatcagaa

SEQ ID NO: 41044 - DNA, 20 bp, synthetic construct
  source 1..20: mol_type = other DNA
gcatcatttcttacatcaga

SEQ ID NO: 41045 - DNA, 20 bp, synthetic construct
  source 1..20: mol_type = other DNA
agcatcatttcttacatcag

SEQ ID NO: 41046 - DNA, 20 bp, synthetic construct
  source 1..20: mol_type = other DNA
gagcatcatttcttacatca

SEQ ID NO: 41047 - DNA, 20 bp, synthetic construct
  source 1..20: mol_type = other DNA
tgagcatcatttcttacatc

SEQ ID NO: 41048 - DNA, 20 bp, synthetic construct
  source 1..20: mol_type = other DNA
gtgagcatcatttcttacat

SEQ ID NO: 41049 - DNA, 20 bp, synthetic construct
  source 1..20: mol_type = other DNA
ggtgagcatcatttcttaca

SEQ ID NO: 41050 - DNA, 20 bp, synthetic construct
  source 1..20: mol_type = other DNA
tggtgagcatcatttcttac

SEQ ID NO: 41051 - DNA, 20 bp, synthetic construct
  source 1..20: mol_type = other DNA
ctggtgagcatcatttctta

SEQ ID NO: 41052 - DNA, 20 bp, synthetic construct
  source 1..20: mol_type = other DNA
gctggtgagcatcatttctt

SEQ ID NO: 41053 - DNA, 20 bp, synthetic construct
  source 1..20: mol_type = other DNA
agctggtgagcatcatttct

SEQ ID NO: 41054 - DNA, 20 bp, synthetic construct
  source 1..20: mol_type = other DNA
cagctggtgagcatcatttc

SEQ ID NO: 41055 - DNA, 20 bp, synthetic construct
  source 1..20: mol_type = other DNA
ccagctggtgagcatcattt

SEQ ID NO: 41056 - DNA, 20 bp, synthetic construct
  source 1..20: mol_type = other DNA
agacatttgtccagtatgct

SEQ ID NO: 41057 - DNA, 20 bp, synthetic construct
  source 1..20: mol_type = other DNA
tagacatttgtccagtatgc

SEQ ID NO: 41058 - DNA, 20 bp, synthetic construct
  source 1..20: mol_type = other DNA
ttagacatttgtccagtatg

SEQ ID NO: 41059 - DNA, 20 bp, synthetic construct
  source 1..20: mol_type = other DNA
cttagacatttgtccagtat

SEQ ID NO: 41060 - DNA, 20 bp, synthetic construct
  source 1..20: mol_type = other DNA
gcttagacatttgtccagta

SEQ ID NO: 41061 - DNA, 20 bp, synthetic construct
  source 1..20: mol_type = other DNA
ggcttagacatttgtccagt

SEQ ID NO: 41062 - DNA, 20 bp, synthetic construct
  source 1..20: mol_type = other DNA
aggcttagacatttgtccag

SEQ ID NO: 41063 - DNA, 20 bp, synthetic construct
  source 1..20: mol_type = other DNA
gaggcttagacatttgtcca

SEQ ID NO: 41064 - DNA, 20 bp, synthetic construct
  source 1..20: mol_type = other DNA
cgaggcttagacatttgtcc

SEQ ID NO: 41065 - DNA, 20 bp, synthetic construct
  source 1..20: mol_type = other DNA
acgaggcttagacatttgtc

SEQ ID NO: 41066 - DNA, 20 bp, synthetic construct
  source 1..20: mol_type = other DNA
cacgaggcttagacatttgt

SEQ ID NO: 41067 - DNA, 20 bp, synthetic construct
  source 1..20: mol_type = other DNA
ccacgaggcttagacatttg

SEQ ID NO: 41068 - DNA, 20 bp, synthetic construct
  source 1..20: mol_type = other DNA
accacgaggcttagacattt

SEQ ID NO: 41069 - DNA, 20 bp, synthetic construct
  source 1..20: mol_type = other DNA
aaccacgaggcttagacatt

SEQ ID NO: 41070 - DNA, 20 bp, synthetic construct
  source 1..20: mol_type = other DNA
taaccacgaggcttagacat

SEQ ID NO: 41071 - DNA, 20 bp, synthetic construct
  source 1..20: mol_type = other DNA
ctaaccacgaggcttagaca

SEQ ID NO: 41072 - DNA, 20 bp, synthetic construct
  source 1..20: mol_type = other DNA
actaaccacgaggcttagac

SEQ ID NO: 41073 - DNA, 20 bp, synthetic construct
  source 1..20: mol_type = other DNA
cactaaccacgaggcttaga

SEQ ID NO: 41074 - DNA, 20 bp, synthetic construct
  source 1..20: mol_type = other DNA
ccactaaccacgaggcttag

SEQ ID NO: 41075 - DNA, 20 bp, synthetic construct
  source 1..20: mol_type = other DNA
cccactaaccacgaggctta

SEQ ID NO: 41076 - DNA, 20 bp, synthetic construct
  source 1..20: mol_type = other DNA
ccccactaaccacgaggctt

SEQ ID NO: 41077 - DNA, 20 bp, synthetic construct
  source 1..20: mol_type = other DNA
tccccactaaccacgaggct

SEQ ID NO: 41078 - DNA, 20 bp, synthetic construct
  source 1..20: mol_type = other DNA
tgtccccactaaccacgagg

SEQ ID NO: 41079 - DNA, 20 bp, synthetic construct
  source 1..20: mol_type = other DNA
atgtccccactaaccacgag

SEQ ID NO: 41080 - DNA, 20 bp, synthetic construct
  source 1..20: mol_type = other DNA
aatgtccccactaaccacga

SEQ ID NO: 41081 - DNA, 20 bp, synthetic construct
  source 1..20: mol_type = other DNA
caatgtccccactaaccacg

SEQ ID NO: 41082 - DNA, 20 bp, synthetic construct
  source 1..20: mol_type = other DNA
gcaatgtccccactaaccac

SEQ ID NO: 41083 - DNA, 20 bp, synthetic construct
  source 1..20: mol_type = other DNA
agcaatgtccccactaacca

SEQ ID NO: 41084 - DNA, 20 bp, synthetic construct
  source 1..20: mol_type = other DNA
cagcaatgtccccactaacc

SEQ ID NO: 41085 - DNA, 20 bp, synthetic construct
  source 1..20: mol_type = other DNA
ccagcaatgtccccactaac

SEQ ID NO: 41086 - DNA, 20 bp, synthetic construct
  source 1..20: mol_type = other DNA
accagcaatgtccccactaa

SEQ ID NO: 41087 - DNA, 20 bp, synthetic construct
  source 1..20: mol_type = other DNA
caccagcaatgtccccacta

SEQ ID NO: 41088 - DNA, 20 bp, synthetic construct
  source 1..20: mol_type = other DNA
agactccaccagcaatgtcc

SEQ ID NO: 41089 - DNA, 20 bp, synthetic construct
  source 1..20: mol_type = other DNA
cagactccaccagcaatgtc

SEQ ID NO: 41090 - DNA, 20 bp, synthetic construct
  source 1..20: mol_type = other DNA
tcagactccaccagcaatgt

SEQ ID NO: 41091 - DNA, 20 bp, synthetic construct
  source 1..20: mol_type = other DNA
ttcagactccaccagcaatg

SEQ ID NO: 41092 - DNA, 20 bp, synthetic construct
  source 1..20: mol_type = other DNA
tttcagactccaccagcaat

SEQ ID NO: 41093 - DNA, 20 bp, synthetic construct
  source 1..20: mol_type = other DNA
atttcagactccaccagcaa

SEQ ID NO: 41094 - DNA, 20 bp, synthetic construct
  source 1..20: mol_type = other DNA
aatttcagactccaccagca

SEQ ID NO: 41095 - DNA, 20 bp, synthetic construct
  source 1..20: mol_type = other DNA
caatttcagactccaccagc

SEQ ID NO: 41096 - DNA, 20 bp, synthetic construct
  source 1..20: mol_type = other DNA
acaatttcagactccaccag

SEQ ID NO: 41097 - DNA, 20 bp, synthetic construct
  source 1..20: mol_type = other DNA
gacaatttcagactccacca

SEQ ID NO: 41098 - DNA, 20 bp, synthetic construct
  source 1..20: mol_type = other DNA
tgacaatttcagactccacc

SEQ ID NO: 41099 - DNA, 20 bp, synthetic construct
  source 1..20: mol_type = other DNA
atgacaatttcagactccac

SEQ ID NO: 41100 - DNA, 20 bp, synthetic construct
  source 1..20: mol_type = other DNA
catgacaatttcagactcca

SEQ ID NO: 41101 - DNA, 20 bp, synthetic construct
  source 1..20: mol_type = other DNA
gcatgacaatttcagactcc

SEQ ID NO: 41102 - DNA, 20 bp, synthetic construct
  source 1..20: mol_type = other DNA
tgcatgacaatttcagactc

SEQ ID NO: 41103 - DNA, 20 bp, synthetic construct
  source 1..20: mol_type = other DNA
ctgcatgacaatttcagact

SEQ ID NO: 41104 - DNA, 20 bp, synthetic construct
  source 1..20: mol_type = other DNA
actgcatgacaatttcagac

SEQ ID NO: 41105 - DNA, 20 bp, synthetic construct
  source 1..20: mol_type = other DNA
cactgcatgacaatttcaga

SEQ ID NO: 41106 - DNA, 20 bp, synthetic construct
  source 1..20: mol_type = other DNA
tcactgcatgacaatttcag

SEQ ID NO: 41107 - DNA, 20 bp, synthetic construct
  source 1..20: mol_type = other DNA
gtcactgcatgacaatttca

SEQ ID NO: 41108 - DNA, 20 bp, synthetic construct
  source 1..20: mol_type = other DNA
agtcactgcatgacaatttc

SEQ ID NO: 41109 - DNA, 20 bp, synthetic construct
  source 1..20: mol_type = other DNA
gagtcactgcatgacaattt

SEQ ID NO: 41110 - DNA, 20 bp, synthetic construct
  source 1..20: mol_type = other DNA
tgagtcactgcatgacaatt

SEQ ID NO: 41111 - DNA, 20 bp, synthetic construct
  source 1..20: mol_type = other DNA
gtgagtcactgcatgacaat

SEQ ID NO: 41112 - DNA, 20 bp, synthetic construct
  source 1..20: mol_type = other DNA
agtgagtcactgcatgacaa

SEQ ID NO: 41113 - DNA, 20 bp, synthetic construct
  source 1..20: mol_type = other DNA
gagtgagtcactgcatgaca

SEQ ID NO: 41114 - DNA, 20 bp, synthetic construct
  source 1..20: mol_type = other DNA
tgagtgagtcactgcatgac

SEQ ID NO: 41115 - DNA, 20 bp, synthetic construct
  source 1..20: mol_type = other DNA
ttgagtgagtcactgcatga

SEQ ID NO: 41116 - DNA, 20 bp, synthetic construct
  source 1..20: mol_type = other DNA
cttgagtgagtcactgcatg

SEQ ID NO: 41117 - DNA, 20 bp, synthetic construct
  source 1..20: mol_type = other DNA
gcttgagtgagtcactgcat

SEQ ID NO: 41118 - DNA, 20 bp, synthetic construct
  source 1..20: mol_type = other DNA
agcttgagtgagtcactgca

SEQ ID NO: 41119 - DNA, 20 bp, synthetic construct
  source 1..20: mol_type = other DNA
aagcttgagtgagtcactgc

SEQ ID NO: 41120 - DNA, 20 bp, synthetic construct
  source 1..20: mol_type = other DNA
taagcttgagtgagtcactg

SEQ ID NO: 41121 - DNA, 20 bp, synthetic construct
  source 1..20: mol_type = other DNA
ctaagcttgagtgagtcact

SEQ ID NO: 41122 - DNA, 20 bp, synthetic construct
  source 1..20: mol_type = other DNA
cctaagcttgagtgagtcac

SEQ ID NO: 41123 - DNA, 20 bp, synthetic construct
  source 1..20: mol_type = other DNA
gcctaagcttgagtgagtca

SEQ ID NO: 41124 - DNA, 20 bp, synthetic construct
  source 1..20: mol_type = other DNA
tgcctaagcttgagtgagtc

SEQ ID NO: 41125 - DNA, 20 bp, synthetic construct
  source 1..20: mol_type = other DNA
ctgcctaagcttgagtgagt

SEQ ID NO: 41126 - DNA, 20 bp, synthetic construct
  source 1..20: mol_type = other DNA
tctgcctaagcttgagtgag

SEQ ID NO: 41127 - DNA, 20 bp, synthetic construct
  source 1..20: mol_type = other DNA
atctgcctaagcttgagtga

SEQ ID NO: 41128 - DNA, 20 bp, synthetic construct
  source 1..20: mol_type = other DNA
aatctgcctaagcttgagtg

SEQ ID NO: 41129 - DNA, 20 bp, synthetic construct
  source 1..20: mol_type = other DNA
aaatctgcctaagcttgagt

SEQ ID NO: 41130 - DNA, 20 bp, synthetic construct
  source 1..20: mol_type = other DNA
caaatctgcctaagcttgag

SEQ ID NO: 41131 - DNA, 20 bp, synthetic construct
  source 1..20: mol_type = other DNA
ccaaatctgcctaagcttga

SEQ ID NO: 41132 - DNA, 20 bp, synthetic construct
  source 1..20: mol_type = other DNA
accaaatctgcctaagcttg

SEQ ID NO: 41133 - DNA, 20 bp, synthetic construct
  source 1..20: mol_type = other DNA
caccaaatctgcctaagctt

SEQ ID NO: 41134 - DNA, 20 bp, synthetic construct
  source 1..20: mol_type = other DNA
tcaccaaatctgcctaagct

SEQ ID NO: 41135 - DNA, 20 bp, synthetic construct
  source 1..20: mol_type = other DNA
atcaccaaatctgcctaagc

SEQ ID NO: 41136 - DNA, 20 bp, synthetic construct
  source 1..20: mol_type = other DNA
tatcaccaaatctgcctaag

SEQ ID NO: 41137 - DNA, 20 bp, synthetic construct
  source 1..20: mol_type = other DNA
atatcaccaaatctgcctaa

SEQ ID NO: 41138 - DNA, 20 bp, synthetic construct
  source 1..20: mol_type = other DNA
tatatcaccaaatctgccta

SEQ ID NO: 41139 - DNA, 20 bp, synthetic construct
  source 1..20: mol_type = other DNA
atatatcaccaaatctgcct

SEQ ID NO: 41140 - DNA, 20 bp, synthetic construct
  source 1..20: mol_type = other DNA
catatatcaccaaatctgcc

SEQ ID NO: 41141 - DNA, 20 bp, synthetic construct
  source 1..20: mol_type = other DNA
tcatatatcaccaaatctgc

SEQ ID NO: 41142 - DNA, 20 bp, synthetic construct
  source 1..20: mol_type = other DNA
gtcatatatcaccaaatctg

SEQ ID NO: 41143 - DNA, 20 bp, synthetic construct
  source 1..20: mol_type = other DNA
tgtcatatatcaccaaatct

SEQ ID NO: 41144 - DNA, 20 bp, synthetic construct
  source 1..20: mol_type = other DNA
gtgtcatatatcaccaaatc

SEQ ID NO: 41145 - DNA, 20 bp, synthetic construct
  source 1..20: mol_type = other DNA
tgtgtcatatatcaccaaat

SEQ ID NO: 41146 - DNA, 20 bp, synthetic construct
  source 1..20: mol_type = other DNA
ctgtgtcatatatcaccaaa

SEQ ID NO: 41147 - DNA, 20 bp, synthetic construct
  source 1..20: mol_type = other DNA
tctgtgtcatatatcaccaa

SEQ ID NO: 41148 - DNA, 20 bp, synthetic construct
  source 1..20: mol_type = other DNA
ctctgtgtcatatatcacca

SEQ ID NO: 41149 - DNA, 20 bp, synthetic construct
  source 1..20: mol_type = other DNA
tctctgtgtcatatatcacc

SEQ ID NO: 41150 - DNA, 20 bp, synthetic construct
  source 1..20: mol_type = other DNA
atctctgtgtcatatatcac

SEQ ID NO: 41151 - DNA, 20 bp, synthetic construct
  source 1..20: mol_type = other DNA
catctctgtgtcatatatca

SEQ ID NO: 41152 - DNA, 20 bp, synthetic construct
  source 1..20: mol_type = other DNA
gcatctctgtgtcatatatc

SEQ ID NO: 41153 - DNA, 20 bp, synthetic construct
  source 1..20: mol_type = other DNA
tgcatctctgtgtcatatat

SEQ ID NO: 41154 - DNA, 20 bp, synthetic construct
  source 1..20: mol_type = other DNA
ttgcatctctgtgtcatata

SEQ ID NO: 41155 - DNA, 20 bp, synthetic construct
  source 1..20: mol_type = other DNA
tttgcatctctgtgtcatat

SEQ ID NO: 41156 - DNA, 20 bp, synthetic construct
  source 1..20: mol_type = other DNA
ctttgcatctctgtgtcata

SEQ ID NO: 41157 - DNA, 20 bp, synthetic construct
  source 1..20: mol_type = other DNA
tctttgcatctctgtgtcat

SEQ ID NO: 41158 - DNA, 20 bp, synthetic construct
  source 1..20: mol_type = other DNA
ttctttgcatctctgtgtca

SEQ ID NO: 41159 - DNA, 20 bp, synthetic construct
  source 1..20: mol_type = other DNA
tttctttgcatctctgtgtc

SEQ ID NO: 41160 - DNA, 20 bp, synthetic construct
  source 1..20: mol_type = other DNA
atttctttgcatctctgtgt

SEQ ID NO: 41161 - DNA, 20 bp, synthetic construct
  source 1..20: mol_type = other DNA
catttctttgcatctctgtg

SEQ ID NO: 41162 - DNA, 20 bp, synthetic construct
  source 1..20: mol_type = other DNA
acatttctttgcatctctgt

SEQ ID NO: 41163 - DNA, 20 bp, synthetic construct
  source 1..20: mol_type = other DNA
aacatttctttgcatctctg

SEQ ID NO: 41164 - DNA, 20 bp, synthetic construct
  source 1..20: mol_type = other DNA
caacatttctttgcatctct

SEQ ID NO: 41165 - DNA, 20 bp, synthetic construct
  source 1..20: mol_type = other DNA
acaacatttctttgcatctc

SEQ ID NO: 41166 - DNA, 20 bp, synthetic construct
  source 1..20: mol_type = other DNA
tacaacatttctttgcatct

SEQ ID NO: 41167 - DNA, 20 bp, synthetic construct
  source 1..20: mol_type = other DNA
ctacaacatttctttgcatc

SEQ ID NO: 41168 - DNA, 20 bp, synthetic construct
  source 1..20: mol_type = other DNA
gctacaacatttctttgcat

SEQ ID NO: 41169 - DNA, 20 bp, synthetic construct
  source 1..20: mol_type = other DNA
agctacaacatttctttgca

SEQ ID NO: 41170 - DNA, 20 bp, synthetic construct
  source 1..20: mol_type = other DNA
cagctacaacatttctttgc

SEQ ID NO: 41171 - DNA, 20 bp, synthetic construct
  source 1..20: mol_type = other DNA
tcagctacaacatttctttg

SEQ ID NO: 41172 - DNA, 20 bp, synthetic construct
  source 1..20: mol_type = other DNA
gtcagctacaacatttcttt

SEQ ID NO: 41173 - DNA, 20 bp, synthetic construct
  source 1..20: mol_type = other DNA
tgtcagctacaacatttctt

SEQ ID NO: 41174 - DNA, 20 bp, synthetic construct
  source 1..20: mol_type = other DNA
gtgtcagctacaacatttct

SEQ ID NO: 41175 - DNA, 20 bp, synthetic construct
  source 1..20: mol_type = other DNA
tgtgtcagctacaacatttc

SEQ ID NO: 41176 - DNA, 20 bp, synthetic construct
  source 1..20: mol_type = other DNA
gtgtgtcagctacaacattt

SEQ ID NO: 41177 - DNA, 20 bp, synthetic construct
  source 1..20: mol_type = other DNA
tgtgtgtcagctacaacatt

SEQ ID NO: 41178 - DNA, 20 bp, synthetic construct
  source 1..20: mol_type = other DNA
gtgtgtgtcagctacaacat

SEQ ID NO: 41179 - DNA, 20 bp, synthetic construct
  source 1..20: mol_type = other DNA
tgtgtgtgtcagctacaaca

SEQ ID NO: 41180 - DNA, 20 bp, synthetic construct
  source 1..20: mol_type = other DNA
ctgtgtgtgtcagctacaac

SEQ ID NO: 41181 - DNA, 20 bp, synthetic construct
  source 1..20: mol_type = other DNA
cctgtgtgtgtcagctacaa

SEQ ID NO: 41182 - DNA, 20 bp, synthetic construct
  source 1..20: mol_type = other DNA
ttttgggggacgtgctcctt

SEQ ID NO: 41183 - DNA, 20 bp, synthetic construct
  source 1..20: mol_type = other DNA
attttgggggacgtgctcct

SEQ ID NO: 41184 - DNA, 20 bp, synthetic construct
  source 1..20: mol_type = other DNA
cattttgggggacgtgctcc

SEQ ID NO: 41185 - DNA, 20 bp, synthetic construct
  source 1..20: mol_type = other DNA
tcattttgggggacgtgctc

SEQ ID NO: 41186 - DNA, 20 bp, synthetic construct
  source 1..20: mol_type = other DNA
ttcattttgggggacgtgct

SEQ ID NO: 41187 - DNA, 20 bp, synthetic construct
  source 1..20: mol_type = other DNA
cttcattttgggggacgtgc

SEQ ID NO: 41188 - DNA, 20 bp, synthetic construct
  source 1..20: mol_type = other DNA
gcttcattttgggggacgtg

SEQ ID NO: 41189 - DNA, 20 bp, synthetic construct
  source 1..20: mol_type = other DNA
ggcttcattttgggggacgt

SEQ ID NO: 41190 - DNA, 20 bp, synthetic construct
  source 1..20: mol_type = other DNA
tggcttcattttgggggacg

SEQ ID NO: 41191 - DNA, 20 bp, synthetic construct
  source 1..20: mol_type = other DNA
ctggcttcattttgggggac

SEQ ID NO: 41192 - DNA, 20 bp, synthetic construct
  source 1..20: mol_type = other DNA
tctggcttcattttggggga

SEQ ID NO: 41193 - DNA, 20 bp, synthetic construct
  source 1..20: mol_type = other DNA
gtctggcttcattttggggg

SEQ ID NO: 41194 - DNA, 20 bp, synthetic construct
  source 1..20: mol_type = other DNA
tgtctggcttcattttgggg

SEQ ID NO: 41195 - DNA, 20 bp, synthetic construct
  source 1..20: mol_type = other DNA
ctgtctggcttcattttggg

SEQ ID NO: 41196 - DNA, 20 bp, synthetic construct
  source 1..20: mol_type = other DNA
tctgtctggcttcattttgg

SEQ ID NO: 41197 - DNA, 20 bp, synthetic construct
  source 1..20: mol_type = other DNA
gtctgtctggcttcattttg

SEQ ID NO: 41198 - DNA, 20 bp, synthetic construct
  source 1..20: mol_type = other DNA
tgtctgtctggcttcatttt

SEQ ID NO: 41199 - DNA, 20 bp, synthetic construct
  source 1..20: mol_type = other DNA
atgtctgtctggcttcattt

SEQ ID NO: 41200 - DNA, 20 bp, synthetic construct
  source 1..20: mol_type = other DNA
gatgtctgtctggcttcatt

SEQ ID NO: 41201 - DNA, 20 bp, synthetic construct
  source 1..20: mol_type = other DNA
ggatgtctgtctggcttcat

SEQ ID NO: 41202 - DNA, 20 bp, synthetic construct
  source 1..20: mol_type = other DNA
aggatgtctgtctggcttca

SEQ ID NO: 41203 - DNA, 20 bp, synthetic construct
  source 1..20: mol_type = other DNA
aaggatgtctgtctggcttc

SEQ ID NO: 41204 - DNA, 20 bp, synthetic construct
  source 1..20: mol_type = other DNA
taaggatgtctgtctggctt

SEQ ID NO: 41205 - DNA, 20 bp, synthetic construct
  source 1..20: mol_type = other DNA
ttaaggatgtctgtctggct

SEQ ID NO: 41206 - DNA, 20 bp, synthetic construct
  source 1..20: mol_type = other DNA
cttaaggatgtctgtctggc

SEQ ID NO: 41207 - DNA, 20 bp, synthetic construct
  source 1..20: mol_type = other DNA
ccttaaggatgtctgtctgg

SEQ ID NO: 41208 - DNA, 20 bp, synthetic construct
  source 1..20: mol_type = other DNA
tccttaaggatgtctgtctg

SEQ ID NO: 41209 - DNA, 20 bp, synthetic construct
  source 1..20: mol_type = other DNA
ttccttaaggatgtctgtct

SEQ ID NO: 41210 - DNA, 20 bp, synthetic construct
  source 1..20: mol_type = other DNA
cttccttaaggatgtctgtc

SEQ ID NO: 41211 - DNA, 20 bp, synthetic construct
  source 1..20: mol_type = other DNA
ccttccttaaggatgtctgt

SEQ ID NO: 41212 - DNA, 20 bp, synthetic construct
  source 1..20: mol_type = other DNA
tccttccttaaggatgtctg

SEQ ID NO: 41213 - DNA, 20 bp, synthetic construct
  source 1..20: mol_type = other DNA
ctccttccttaaggatgtct

SEQ ID NO: 41214 - DNA, 20 bp, synthetic construct
  source 1..20: mol_type = other DNA
gctccttccttaaggatgtc

SEQ ID NO: 41215 - DNA, 20 bp, synthetic construct
  source 1..20: mol_type = other DNA
tgctccttccttaaggatgt

SEQ ID NO: 41216 - DNA, 20 bp, synthetic construct
  source 1..20: mol_type = other DNA
ttgctccttccttaaggatg

SEQ ID NO: 41217 - DNA, 20 bp, synthetic construct
  source 1..20: mol_type = other DNA
tttgctccttccttaaggat

SEQ ID NO: 41218 - DNA, 20 bp, synthetic construct
  source 1..20: mol_type = other DNA
ctttgctccttccttaagga

SEQ ID NO: 41219 - DNA, 20 bp, synthetic construct
  source 1..20: mol_type = other DNA
cctttgctccttccttaagg

SEQ ID NO: 41220 - DNA, 20 bp, synthetic construct
  source 1..20: mol_type = other DNA
ccctttgctccttccttaag

SEQ ID NO: 41221 - DNA, 20 bp, synthetic construct
  source 1..20: mol_type = other DNA
atgaagcccctttgctcctt

SEQ ID NO: 41222 - DNA, 20 bp, synthetic construct
  source 1..20: mol_type = other DNA
agatgaagcccctttgctcc

SEQ ID NO: 41223 - DNA, 20 bp, synthetic construct
  source 1..20: mol_type = other DNA
aagatgaagcccctttgctc

SEQ ID NO: 41224 - DNA, 20 bp, synthetic construct
  source 1..20: mol_type = other DNA
taagatgaagcccctttgct

SEQ ID NO: 41225 - DNA, 20 bp, synthetic construct
  source 1..20: mol_type = other DNA
ttaagatgaagcccctttgc

SEQ ID NO: 41226 - DNA, 20 bp, synthetic construct
  source 1..20: mol_type = other DNA
tttaagatgaagcccctttg

SEQ ID NO: 41227 - DNA, 20 bp, synthetic construct
  source 1..20: mol_type = other DNA
ctttaagatgaagccccttt

SEQ ID NO: 41228 - DNA, 20 bp, synthetic construct
  source 1..20: mol_type = other DNA
tctttaagatgaagcccctt

SEQ ID NO: 41229 - DNA, 20 bp, synthetic construct
  source 1..20: mol_type = other DNA
ttctttaagatgaagcccct

SEQ ID NO: 41230 - DNA, 20 bp, synthetic construct
  source 1..20: mol_type = other DNA
attctttaagatgaagcccc

SEQ ID NO: 41231 - DNA, 20 bp, synthetic construct
  source 1..20: mol_type = other DNA
cattctttaagatgaagccc

SEQ ID NO: 41232 - DNA, 20 bp, synthetic construct
  source 1..20: mol_type = other DNA
tcattctttaagatgaagcc

SEQ ID NO: 41233 - DNA, 20 bp, synthetic construct
  source 1..20: mol_type = other DNA
cttcttcattctttaagatg

SEQ ID NO: 41234 - DNA, 20 bp, synthetic construct
  source 1..20: mol_type = other DNA
ccttcttcattctttaagat

SEQ ID NO: 41235 - DNA, 20 bp, synthetic construct
  source 1..20: mol_type = other DNA
cccttcttcattctttaaga

SEQ ID NO: 41236 - DNA, 20 bp, synthetic construct
  source 1..20: mol_type = other DNA
tcccttcttcattctttaag

SEQ ID NO: 41237 - DNA, 20 bp, synthetic construct
  source 1..20: mol_type = other DNA
atcccttcttcattctttaa

SEQ ID NO: 41238 - DNA, 20 bp, synthetic construct
  source 1..20: mol_type = other DNA
aatcccttcttcattcttta

SEQ ID NO: 41239 - DNA, 20 bp, synthetic construct
  source 1..20: mol_type = other DNA
aaatcccttcttcattcttt

SEQ ID NO: 41240 - DNA, 20 bp, synthetic construct
  source 1..20: mol_type = other DNA
caaatcccttcttcattctt

SEQ ID NO: 41241 - DNA, 20 bp, synthetic construct
  source 1..20: mol_type = other DNA
acaaatcccttcttcattct

SEQ ID NO: 41242 - DNA, 20 bp, synthetic construct
  source 1..20: mol_type = other DNA
gacaaatcccttcttcattc

SEQ ID NO: 41243 - DNA, 20 bp, synthetic construct
  source 1..20: mol_type = other DNA
tgacaaatcccttcttcatt

SEQ ID NO: 41244 - DNA, 20 bp, synthetic construct
  source 1..20: mol_type = other DNA
atgacaaatcccttcttcat

SEQ ID NO: 41245 - DNA, 20 bp, synthetic construct
  source 1..20: mol_type = other DNA
catgacaaatcccttcttca

SEQ ID NO: 41246 - DNA, 20 bp, synthetic construct
  source 1..20: mol_type = other DNA
tcatgacaaatcccttcttc

SEQ ID NO: 41247 - DNA, 20 bp, synthetic construct
  source 1..20: mol_type = other DNA
ctcatgacaaatcccttctt

SEQ ID NO: 41248 - DNA, 20 bp, synthetic construct
  source 1..20: mol_type = other DNA
tctcatgacaaatcccttct

SEQ ID NO: 41249 - DNA, 20 bp, synthetic construct
  source 1..20: mol_type = other DNA
ctctcatgacaaatcccttc

SEQ ID NO: 41250 - DNA, 20 bp, synthetic construct
  source 1..20: mol_type = other DNA
tctctcatgacaaatccctt

SEQ ID NO: 41251 - DNA, 20 bp, synthetic construct
  source 1..20: mol_type = other DNA
atctctcatgacaaatccct

SEQ ID NO: 41252 - DNA, 20 bp, synthetic construct
  source 1..20: mol_type = other DNA
catctctcatgacaaatccc

SEQ ID NO: 41253 - DNA, 20 bp, synthetic construct
  source 1..20: mol_type = other DNA
acatctctcatgacaaatcc

SEQ ID NO: 41254 - DNA, 20 bp, synthetic construct
  source 1..20: mol_type = other DNA
cacatctctcatgacaaatc

SEQ ID NO: 41255 - DNA, 20 bp, synthetic construct
  source 1..20: mol_type = other DNA
ccacatctctcatgacaaat

SEQ ID NO: 41256 - DNA, 20 bp, synthetic construct
  source 1..20: mol_type = other DNA
gccacatctctcatgacaaa

SEQ ID NO: 41257 - DNA, 20 bp, synthetic construct
  source 1..20: mol_type = other DNA
tgccacatctctcatgacaa

SEQ ID NO: 41258 - DNA, 20 bp, synthetic construct
  source 1..20: mol_type = other DNA
ctgccacatctctcatgaca

SEQ ID NO: 41259 - DNA, 20 bp, synthetic construct
  source 1..20: mol_type = other DNA
cctgccacatctctcatgac

SEQ ID NO: 41260 - DNA, 20 bp, synthetic construct
  source 1..20: mol_type = other DNA
tcctgccacatctctcatga

SEQ ID NO: 41261 - DNA, 20 bp, synthetic construct
  source 1..20: mol_type = other DNA
ttcctgccacatctctcatg

SEQ ID NO: 41262 - DNA, 20 bp, synthetic construct
  source 1..20: mol_type = other DNA
attcctgccacatctctcat

SEQ ID NO: 41263 - DNA, 20 bp, synthetic construct
  source 1..20: mol_type = other DNA
aattcctgccacatctctca

SEQ ID NO: 41264 - DNA, 20 bp, synthetic construct
  source 1..20: mol_type = other DNA
aaattcctgccacatctctc

SEQ ID NO: 41265 - DNA, 20 bp, synthetic construct
  source 1..20: mol_type = other DNA
gaaattcctgccacatctct

SEQ ID NO: 41266 - DNA, 20 bp, synthetic construct
  source 1..20: mol_type = other DNA
agaaattcctgccacatctc

SEQ ID NO: 41267 - DNA, 20 bp, synthetic construct
  source 1..20: mol_type = other DNA
aagaaattcctgccacatct

SEQ ID NO: 41268 - DNA, 20 bp, synthetic construct
  source 1..20: mol_type = other DNA
caagaaattcctgccacatc

SEQ ID NO: 41269 - DNA, 20 bp, synthetic construct
  source 1..20: mol_type = other DNA
tcaagaaattcctgccacat

SEQ ID NO: 41270 - DNA, 20 bp, synthetic construct
  source 1..20: mol_type = other DNA
ctcaagaaattcctgccaca

SEQ ID NO: 41271 - DNA, 20 bp, synthetic construct
  source 1..20: mol_type = other DNA
tctcaagaaattcctgccac

SEQ ID NO: 41272 - DNA, 20 bp, synthetic construct
  source 1..20: mol_type = other DNA
ctctcaagaaattcctgcca

SEQ ID NO: 41273 - DNA, 20 bp, synthetic construct
  source 1..20: mol_type = other DNA
cctctcaagaaattcctgcc

SEQ ID NO: 41274 - DNA, 20 bp, synthetic construct
  source 1..20: mol_type = other DNA
gcctctcaagaaattcctgc

SEQ ID NO: 41275 - DNA, 20 bp, synthetic construct
  source 1..20: mol_type = other DNA
tgcctctcaagaaattcctg

SEQ ID NO: 41276 - DNA, 20 bp, synthetic construct
  source 1..20: mol_type = other DNA
ctgcctctcaagaaattcct

SEQ ID NO: 41277 - DNA, 20 bp, synthetic construct
  source 1..20: mol_type = other DNA
tctgcctctcaagaaattcc

SEQ ID NO: 41278 - DNA, 20 bp, synthetic construct
  source 1..20: mol_type = other DNA
ctctgcctctcaagaaattc

SEQ ID NO: 41279 - DNA, 20 bp, synthetic construct
  source 1..20: mol_type = other DNA
cctctgcctctcaagaaatt

SEQ ID NO: 41280 - DNA, 20 bp, synthetic construct
  source 1..20: mol_type = other DNA
ccctctgcctctcaagaaat

SEQ ID NO: 41281 - DNA, 20 bp, synthetic construct
  source 1..20: mol_type = other DNA
tccctctgcctctcaagaaa

SEQ ID NO: 41282 - DNA, 20 bp, synthetic construct
  source 1..20: mol_type = other DNA
ctccctctgcctctcaagaa

SEQ ID NO: 41283 - DNA, 20 bp, synthetic construct
  source 1..20: mol_type = other DNA
attctcatgctctccctctg

SEQ ID NO: 41284 - DNA, 20 bp, synthetic construct
  source 1..20: mol_type = other DNA
acattctcatgctctccctc

SEQ ID NO: 41285 - DNA, 20 bp, synthetic construct
  source 1..20: mol_type = other DNA
aacattctcatgctctccct

SEQ ID NO: 41286 - DNA, 20 bp, synthetic construct
  source 1..20: mol_type = other DNA
taacattctcatgctctccc

SEQ ID NO: 41287 - DNA, 20 bp, synthetic construct
  source 1..20: mol_type = other DNA
ctaacattctcatgctctcc

SEQ ID NO: 41288 - DNA, 20 bp, synthetic construct
  source 1..20: mol_type = other DNA
cctaacattctcatgctctc

SEQ ID NO: 41289 - DNA, 20 bp, synthetic construct
  source 1..20: mol_type = other DNA
tcctaacattctcatgctct

SEQ ID NO: 41290 - DNA, 20 bp, synthetic construct
  source 1..20: mol_type = other DNA
ttcctaacattctcatgctc

SEQ ID NO: 41291 - DNA, 20 bp, synthetic construct
  source 1..20: mol_type = other DNA
cttcctaacattctcatgct

SEQ ID NO: 41292 - DNA, 20 bp, synthetic construct
  source 1..20: mol_type = other DNA
ccttcctaacattctcatgc

SEQ ID NO: 41293 - DNA, 20 bp, synthetic construct
  source 1..20: mol_type = other DNA
gccttcctaacattctcatg

SEQ ID NO: 41294 - DNA, 20 bp, synthetic construct
  source 1..20: mol_type = other DNA
tgccttcctaacattctcat

SEQ ID NO: 41295 - DNA, 20 bp, synthetic construct
  source 1..20: mol_type = other DNA
ctgccttcctaacattctca

SEQ ID NO: 41296 - DNA, 20 bp, synthetic construct
  source 1..20: mol_type = other DNA
cctgccttcctaacattctc

SEQ ID NO: 41297 - DNA, 20 bp, synthetic construct
  source 1..20: mol_type = other DNA
tcctgccttcctaacattct

SEQ ID NO: 41298 - DNA, 20 bp, synthetic construct
  source 1..20: mol_type = other DNA
ctcctgccttcctaacattc

SEQ ID NO: 41299 - DNA, 20 bp, synthetic construct
  source 1..20: mol_type = other DNA
tctcctgccttcctaacatt

SEQ ID NO: 41300 - DNA, 20 bp, synthetic construct
  source 1..20: mol_type = other DNA
ctctcctgccttcctaacat

SEQ ID NO: 41301 - DNA, 20 bp, synthetic construct
  source 1..20: mol_type = other DNA
tctctcctgccttcctaaca

SEQ ID NO: 41302 - DNA, 20 bp, synthetic construct
  source 1..20: mol_type = other DNA
atgtgtgagagtctctcctg

SEQ ID NO: 41303 - DNA, 20 bp, synthetic construct
  source 1..20: mol_type = other DNA
gatgtgtgagagtctctcct

SEQ ID NO: 41304 - DNA, 20 bp, synthetic construct
  source 1..20: mol_type = other DNA
agatgtgtgagagtctctcc

SEQ ID NO: 41305 - DNA, 20 bp, synthetic construct
  source 1..20: mol_type = other DNA
cagatgtgtgagagtctctc

SEQ ID NO: 41306 - DNA, 20 bp, synthetic construct
  source 1..20: mol_type = other DNA
ccagatgtgtgagagtctct

SEQ ID NO: 41307 - DNA, 20 bp, synthetic construct
  source 1..20: mol_type = other DNA
cccagatgtgtgagagtctc

SEQ ID NO: 41308 - DNA, 20 bp, synthetic construct
  source 1..20: mol_type = other DNA
tcccagatgtgtgagagtct

SEQ ID NO: 41309 - DNA, 20 bp, synthetic construct
  source 1..20: mol_type = other DNA
ttcccagatgtgtgagagtc

SEQ ID NO: 41310 - DNA, 20 bp, synthetic construct
  source 1..20: mol_type = other DNA
cttcccagatgtgtgagagt

SEQ ID NO: 41311 - DNA, 20 bp, synthetic construct
  source 1..20: mol_type = other DNA
gcttcccagatgtgtgagag

SEQ ID NO: 41312 - DNA, 20 bp, synthetic construct
  source 1..20: mol_type = other DNA
agcttcccagatgtgtgaga

SEQ ID NO: 41313 - DNA, 20 bp, synthetic construct
  source 1..20: mol_type = other DNA
cagcttcccagatgtgtgag

SEQ ID NO: 41314 - DNA, 20 bp, synthetic construct
  source 1..20: mol_type = other DNA
tcagcttcccagatgtgtga

SEQ ID NO: 41315 - DNA, 20 bp, synthetic construct
  source 1..20: mol_type = other DNA
gtcagcttcccagatgtgtg

SEQ ID NO: 41316 - DNA, 20 bp, synthetic construct
  source 1..20: mol_type = other DNA
tgtcagcttcccagatgtgt

SEQ ID NO: 41317 - DNA, 20 bp, synthetic construct
  source 1..20: mol_type = other DNA
ttgtcagcttcccagatgtg

SEQ ID NO: 41318 - DNA, 20 bp, synthetic construct
  source 1..20: mol_type = other DNA
attgtcagcttcccagatgt

SEQ ID NO: 41319 - DNA, 20 bp, synthetic construct
  source 1..20: mol_type = other DNA
gattgtcagcttcccagatg

SEQ ID NO: 41320 - DNA, 20 bp, synthetic construct
  source 1..20: mol_type = other DNA
ggattgtcagcttcccagat

SEQ ID NO: 41321 - DNA, 20 bp, synthetic construct
  source 1..20: mol_type = other DNA
tggattgtcagcttcccaga

SEQ ID NO: 41322 - DNA, 20 bp, synthetic construct
  source 1..20: mol_type = other DNA
atggattgtcagcttcccag

SEQ ID NO: 41323 - DNA, 20 bp, synthetic construct
  source 1..20: mol_type = other DNA
gatggattgtcagcttccca

SEQ ID NO: 41324 - DNA, 20 bp, synthetic construct
  source 1..20: mol_type = other DNA
tgatggattgtcagcttccc

SEQ ID NO: 41325 - DNA, 20 bp, synthetic construct
  source 1..20: mol_type = other DNA
ctgatggattgtcagcttcc

SEQ ID NO: 41326 - DNA, 20 bp, synthetic construct
  source 1..20: mol_type = other DNA
gctgatggattgtcagcttc

SEQ ID NO: 41327 - DNA, 20 bp, synthetic construct
  source 1..20: mol_type = other DNA
tgctgatggattgtcagctt

SEQ ID NO: 41328 - DNA, 20 bp, synthetic construct
  source 1..20: mol_type = other DNA
atgctgatggattgtcagct

SEQ ID NO: 41329 - DNA, 20 bp, synthetic construct
  source 1..20: mol_type = other DNA
catgctgatggattgtcagc

SEQ ID NO: 41330 - DNA, 20 bp, synthetic construct
  source 1..20: mol_type = other DNA
acatgctgatggattgtcag

SEQ ID NO: 41331 - DNA, 20 bp, synthetic construct
  source 1..20: mol_type = other DNA
gacatgctgatggattgtca

SEQ ID NO: 41332 - DNA, 20 bp, synthetic construct
  source 1..20: mol_type = other DNA
ggacatgctgatggattgtc

SEQ ID NO: 41333 - DNA, 20 bp, synthetic construct
  source 1..20: mol_type = other DNA
tggacatgctgatggattgt

SEQ ID NO: 41334 - DNA, 20 bp, synthetic construct
  source 1..20: mol_type = other DNA
ctggacatgctgatggattg

SEQ ID NO: 41335 - DNA, 20 bp, synthetic construct
  source 1..20: mol_type = other DNA
cctggacatgctgatggatt

SEQ ID NO: 41336 - DNA, 20 bp, synthetic construct
  source 1..20: mol_type = other DNA
tcctggacatgctgatggat

SEQ ID NO: 41337 - DNA, 20 bp, synthetic construct
  source 1..20: mol_type = other DNA
ctcctggacatgctgatgga

SEQ ID NO: 41338 - DNA, 20 bp, synthetic construct
  source 1..20: mol_type = other DNA
cctcctggacatgctgatgg

SEQ ID NO: 41339 - DNA, 20 bp, synthetic construct
  source 1..20: mol_type = other DNA
tcctcctggacatgctgatg

SEQ ID NO: 41340 - DNA, 20 bp, synthetic construct
  source 1..20: mol_type = other DNA
ttcctcctggacatgctgat

SEQ ID NO: 41341 - DNA, 20 bp, synthetic construct
  source 1..20: mol_type = other DNA
tttcctcctggacatgctga

SEQ ID NO: 41342 - DNA, 20 bp, synthetic construct
  source 1..20: mol_type = other DNA
ttttcctcctggacatgctg

SEQ ID NO: 41343 - DNA, 20 bp, synthetic construct
  source 1..20: mol_type = other DNA
attttcctcctggacatgct

SEQ ID NO: 41344 - DNA, 20 bp, synthetic construct
  source 1..20: mol_type = other DNA
tattttcctcctggacatgc

SEQ ID NO: 41345 - DNA, 20 bp, synthetic construct
  source 1..20: mol_type = other DNA
ttattttcctcctggacatg

SEQ ID NO: 41346 - DNA, 20 bp, synthetic construct
  source 1..20: mol_type = other DNA
cttattttcctcctggacat

SEQ ID NO: 41347 - DNA, 20 bp, synthetic construct
  source 1..20: mol_type = other DNA
ccttattttcctcctggaca

SEQ ID NO: 41348 - DNA, 20 bp, synthetic construct
  source 1..20: mol_type = other DNA
tccttattttcctcctggac

SEQ ID NO: 41349 - DNA, 20 bp, synthetic construct
  source 1..20: mol_type = other DNA
ctccttattttcctcctgga

SEQ ID NO: 41350 - DNA, 20 bp, synthetic construct
  source 1..20: mol_type = other DNA
cctccttattttcctcctgg

SEQ ID NO: 41351 - DNA, 20 bp, synthetic construct
  source 1..20: mol_type = other DNA
tcctccttattttcctcctg

SEQ ID NO: 41352 - DNA, 20 bp, synthetic construct
  source 1..20: mol_type = other DNA
tgctcctcctccttattttc

SEQ ID NO: 41353 - DNA, 20 bp, synthetic construct
  source 1..20: mol_type = other DNA
ctgctcctcctccttatttt

SEQ ID NO: 41354 - DNA, 20 bp, synthetic construct
  source 1..20: mol_type = other DNA
atctatttctgctcctcctc

SEQ ID NO: 41355 - DNA, 20 bp, synthetic construct
  source 1..20: mol_type = other DNA
catctatttctgctcctcct

SEQ ID NO: 41356 - DNA, 20 bp, synthetic construct
  source 1..20: mol_type = other DNA
tcatctatttctgctcctcc

SEQ ID NO: 41357 - DNA, 20 bp, synthetic construct
  source 1..20: mol_type = other DNA
ctcatctatttctgctcctc

SEQ ID NO: 41358 - DNA, 20 bp, synthetic construct
  source 1..20: mol_type = other DNA
cctcatctatttctgctcct

SEQ ID NO: 41359 - DNA, 20 bp, synthetic construct
  source 1..20: mol_type = other DNA
agcctcatctatttctgctc

SEQ ID NO: 41360 - DNA, 20 bp, synthetic construct
  source 1..20: mol_type = other DNA
cagcctcatctatttctgct

SEQ ID NO: 41361 - DNA, 20 bp, synthetic construct
  source 1..20: mol_type = other DNA
ccagcctcatctatttctgc

SEQ ID NO: 41362 - DNA, 20 bp, synthetic construct
  source 1..20: mol_type = other DNA
tccagcctcatctatttctg

SEQ ID NO: 41363 - DNA, 20 bp, synthetic construct
  source 1..20: mol_type = other DNA
atccagcctcatctatttct

SEQ ID NO: 41364 - DNA, 20 bp, synthetic construct
  source 1..20: mol_type = other DNA
tatccagcctcatctatttc

SEQ ID NO: 41365 - DNA, 20 bp, synthetic construct
  source 1..20: mol_type = other DNA
atatccagcctcatctattt

SEQ ID NO: 41366 - DNA, 20 bp, synthetic construct
  source 1..20: mol_type = other DNA
tatatccagcctcatctatt

SEQ ID NO: 41367 - DNA, 20 bp, synthetic construct
  source 1..20: mol_type = other DNA
ctatatccagcctcatctat

SEQ ID NO: 41368 - DNA, 20 bp, synthetic construct
  source 1..20: mol_type = other DNA
tctatatccagcctcatcta

SEQ ID NO: 41369 - DNA, 20 bp, synthetic construct
  source 1..20: mol_type = other DNA
ttctatatccagcctcatct

SEQ ID NO: 41370 - DNA, 20 bp, synthetic construct
  source 1..20: mol_type = other DNA
cttctatatccagcctcatc

SEQ ID NO: 41371 - DNA, 20 bp, synthetic construct
  source 1..20: mol_type = other DNA
gcttctatatccagcctcat

SEQ ID NO: 41372 - DNA, 20 bp, synthetic construct
  source 1..20: mol_type = other DNA
tgcttctatatccagcctca

SEQ ID NO: 41373 - DNA, 20 bp, synthetic construct
  source 1..20: mol_type = other DNA
ctgcttctatatccagcctc

SEQ ID NO: 41374 - DNA, 20 bp, synthetic construct
  source 1..20: mol_type = other DNA
cctgcttctatatccagcct

SEQ ID NO: 41375 - DNA, 20 bp, synthetic construct
  source 1..20: mol_type = other DNA
agccctgcttctatatccag

SEQ ID NO: 41376 - DNA, 20 bp, synthetic construct
  source 1..20: mol_type = other DNA
cagccctgcttctatatcca

SEQ ID NO: 41377 - DNA, 20 bp, synthetic construct
  source 1..20: mol_type = other DNA
tcagccctgcttctatatcc

SEQ ID NO: 41378 - DNA, 20 bp, synthetic construct
  source 1..20: mol_type = other DNA
ttcagccctgcttctatatc

SEQ ID NO: 41379 - DNA, 20 bp, synthetic construct
  source 1..20: mol_type = other DNA
cttcagccctgcttctatat

SEQ ID NO: 41380 - DNA, 20 bp, synthetic construct
  source 1..20: mol_type = other DNA
aacacagcttcagccctgct

SEQ ID NO: 41381 - DNA, 20 bp, synthetic construct
  source 1..20: mol_type = other DNA
caacacagcttcagccctgc

SEQ ID NO: 41382 - DNA, 20 bp, synthetic construct
  source 1..20: mol_type = other DNA
acaacacagcttcagccctg

SEQ ID NO: 41383 - DNA, 20 bp, synthetic construct
  source 1..20: mol_type = other DNA
aacaacacagcttcagccct

SEQ ID NO: 41384 - DNA, 20 bp, synthetic construct
  source 1..20: mol_type = other DNA
aaacaacacagcttcagccc

SEQ ID NO: 41385 - DNA, 20 bp, synthetic construct
  source 1..20: mol_type = other DNA
caaacaacacagcttcagcc

SEQ ID NO: 41386 - DNA, 20 bp, synthetic construct
  source 1..20: mol_type = other DNA
acaaacaacacagcttcagc

SEQ ID NO: 41387 - DNA, 20 bp, synthetic construct
  source 1..20: mol_type = other DNA
cacaaacaacacagcttcag

SEQ ID NO: 41388 - DNA, 20 bp, synthetic construct
  source 1..20: mol_type = other DNA
ccacaaacaacacagcttca

SEQ ID NO: 41389 - DNA, 20 bp, synthetic construct
  source 1..20: mol_type = other DNA
accacaaacaacacagcttc

SEQ ID NO: 41390 - DNA, 20 bp, synthetic construct
  source 1..20: mol_type = other DNA
taccacaaacaacacagctt

SEQ ID NO: 41391 - DNA, 20 bp, synthetic construct
  source 1..20: mol_type = other DNA
ttaccacaaacaacacagct

SEQ ID NO: 41392 - DNA, 20 bp, synthetic construct
  source 1..20: mol_type = other DNA
tttaccacaaacaacacagc

SEQ ID NO: 41393 - DNA, 20 bp, synthetic construct
  source 1..20: mol_type = other DNA
tctttaccacaaacaacaca

SEQ ID NO: 41394 - DNA, 20 bp, synthetic construct
  source 1..20: mol_type = other DNA
ctctttaccacaaacaacac

SEQ ID NO: 41395 - DNA, 20 bp, synthetic construct
  source 1..20: mol_type = other DNA
actctttaccacaaacaaca

SEQ ID NO: 41396 - DNA, 20 bp, synthetic construct
  source 1..20: mol_type = other DNA
acaactctttaccacaaaca

SEQ ID NO: 41397 - DNA, 20 bp, synthetic construct
  source 1..20: mol_type = other DNA
cacaactctttaccacaaac

SEQ ID NO: 41398 - DNA, 20 bp, synthetic construct
  source 1..20: mol_type = other DNA
tcacaactctttaccacaaa

SEQ ID NO: 41399 - DNA, 20 bp, synthetic construct
  source 1..20: mol_type = other DNA
atcacaactctttaccacaa

SEQ ID NO: 41400 - DNA, 20 bp, synthetic construct
  source 1..20: mol_type = other DNA
aatcacaactctttaccaca

SEQ ID NO: 41401 - DNA, 20 bp, synthetic construct
  source 1..20: mol_type = other DNA
gaatcacaactctttaccac

SEQ ID NO: 41402 - DNA, 20 bp, synthetic construct
  source 1..20: mol_type = other DNA
agaatcacaactctttacca

SEQ ID NO: 41403 - DNA, 20 bp, synthetic construct
  source 1..20: mol_type = other DNA
tagaatcacaactctttacc

SEQ ID NO: 41404 - DNA, 20 bp, synthetic construct
  source 1..20: mol_type = other DNA
ggatagaatcacaactcttt

SEQ ID NO: 41405 - DNA, 20 bp, synthetic construct
  source 1..20: mol_type = other DNA
tggatagaatcacaactctt

SEQ ID NO: 41406 - DNA, 20 bp, synthetic construct
  source 1..20: mol_type = other DNA
ctggatagaatcacaactct

SEQ ID NO: 41407 - DNA, 20 bp, synthetic construct
  source 1..20: mol_type = other DNA
tctggatagaatcacaactc

SEQ ID NO: 41408 - DNA, 20 bp, synthetic construct
  source 1..20: mol_type = other DNA
ttctggatagaatcacaact

SEQ ID NO: 41409 - DNA, 20 bp, synthetic construct
  source 1..20: mol_type = other DNA
cttctggatagaatcacaac

SEQ ID NO: 41410 - DNA, 20 bp, synthetic construct
  source 1..20: mol_type = other DNA
ccttctggatagaatcacaa

SEQ ID NO: 41411 - DNA, 20 bp, synthetic construct
  source 1..20: mol_type = other DNA
gccttctggatagaatcaca

SEQ ID NO: 41412 - DNA, 20 bp, synthetic construct
  source 1..20: mol_type = other DNA
tgccttctggatagaatcac

SEQ ID NO: 41413 - DNA, 20 bp, synthetic construct
  source 1..20: mol_type = other DNA
ttgccttctggatagaatca

SEQ ID NO: 41414 - DNA, 20 bp, synthetic construct
  source 1..20: mol_type = other DNA
attgccttctggatagaatc

SEQ ID NO: 41415 - DNA, 20 bp, synthetic construct
  source 1..20: mol_type = other DNA
tattgccttctggatagaat

SEQ ID NO: 41416 - DNA, 20 bp, synthetic construct
  source 1..20: mol_type = other DNA
ctattgccttctggatagaa

SEQ ID NO: 41417 - DNA, 20 bp, synthetic construct
  source 1..20: mol_type = other DNA
cctattgccttctggataga

SEQ ID NO: 41418 - DNA, 20 bp, synthetic construct
  source 1..20: mol_type = other DNA
acctattgccttctggatag

SEQ ID NO: 41419 - DNA, 20 bp, synthetic construct
  source 1..20: mol_type = other DNA
tacctattgccttctggata

SEQ ID NO: 41420 - DNA, 20 bp, synthetic construct
  source 1..20: mol_type = other DNA
ctacctattgccttctggat

SEQ ID NO: 41421 - DNA, 20 bp, synthetic construct
  source 1..20: mol_type = other DNA
gctacctattgccttctgga

SEQ ID NO: 41422 - DNA, 20 bp, synthetic construct
  source 1..20: mol_type = other DNA
tgctacctattgccttctgg

SEQ ID NO: 41423 - DNA, 20 bp, synthetic construct
  source 1..20: mol_type = other DNA
gcagaaaatatttgctgact

SEQ ID NO: 41424 - DNA, 20 bp, synthetic construct
  source 1..20: mol_type = other DNA
cctttgcagaaaatatttgc

SEQ ID NO: 41425 - DNA, 20 bp, synthetic construct
  source 1..20: mol_type = other DNA
ccctttgcagaaaatatttg

SEQ ID NO: 41426 - DNA, 20 bp, synthetic construct
  source 1..20: mol_type = other DNA
gccctttgcagaaaatattt

SEQ ID NO: 41427 - DNA, 20 bp, synthetic construct
  source 1..20: mol_type = other DNA
agccctttgcagaaaatatt

SEQ ID NO: 41428 - DNA, 20 bp, synthetic construct
  source 1..20: mol_type = other DNA
tagccctttgcagaaaatat

SEQ ID NO: 41429 - DNA, 20 bp, synthetic construct
  source 1..20: mol_type = other DNA
ttagccctttgcagaaaata

SEQ ID NO: 41430 - DNA, 20 bp, synthetic construct
  source 1..20: mol_type = other DNA
tttagccctttgcagaaaat

SEQ ID NO: 41431 - DNA, 20 bp, synthetic construct
  source 1..20: mol_type = other DNA
atttagccctttgcagaaaa

SEQ ID NO: 41432 - DNA, 20 bp, synthetic construct
  source 1..20: mol_type = other DNA
catttagccctttgcagaaa

SEQ ID NO: 41433 - DNA, 20 bp, synthetic construct
  source 1..20: mol_type = other DNA
acatttagccctttgcagaa

SEQ ID NO: 41434 - DNA, 20 bp, synthetic construct
  source 1..20: mol_type = other DNA
aacatttagccctttgcaga

SEQ ID NO: 41435 - DNA, 20 bp, synthetic construct
  source 1..20: mol_type = other DNA
taacatttagccctttgcag

SEQ ID NO: 41436 - DNA, 20 bp, synthetic construct
  source 1..20: mol_type = other DNA
ttaacatttagccctttgca

SEQ ID NO: 41437 - DNA, 20 bp, synthetic construct
  source 1..20: mol_type = other DNA
tttaacatttagccctttgc

SEQ ID NO: 41438 - DNA, 20 bp, synthetic construct
  source 1..20: mol_type = other DNA
atttaacatttagccctttg

SEQ ID NO: 41439 - DNA, 20 bp, synthetic construct
  source 1..20: mol_type = other DNA
tatttaacatttagcccttt

SEQ ID NO: 41440 - DNA, 20 bp, synthetic construct
  source 1..20: mol_type = other DNA
atatttaacatttagccctt

SEQ ID NO: 41441 - DNA, 20 bp, synthetic construct
  source 1..20: mol_type = other DNA
aatatttaacatttagccct

SEQ ID NO: 41442 - DNA, 20 bp, synthetic construct
  source 1..20: mol_type = other DNA
ccatatggcttggaaaattt

SEQ ID NO: 41443 - DNA, 20 bp, synthetic construct
  source 1..20: mol_type = other DNA
accatatggcttggaaaatt

SEQ ID NO: 41444 - DNA, 20 bp, synthetic construct
  source 1..20: mol_type = other DNA
gaccatatggcttggaaaat

SEQ ID NO: 41445 - DNA, 20 bp, synthetic construct
  source 1..20: mol_type = other DNA
agaccatatggcttggaaaa

SEQ ID NO: 41446 - DNA, 20 bp, synthetic construct
  source 1..20: mol_type = other DNA
gagaccatatggcttggaaa

SEQ ID NO: 41447 - DNA, 20 bp, synthetic construct
  source 1..20: mol_type = other DNA
agagaccatatggcttggaa

SEQ ID NO: 41448 - DNA, 20 bp, synthetic construct
  source 1..20: mol_type = other DNA
gagagaccatatggcttgga

SEQ ID NO: 41449 - DNA, 20 bp, synthetic construct
  source 1..20: mol_type = other DNA
agagagaccatatggcttgg

SEQ ID NO: 41450 - DNA, 20 bp, synthetic construct
  source 1..20: mol_type = other DNA
gagagagaccatatggcttg

SEQ ID NO: 41451 - DNA, 20 bp, synthetic construct
  source 1..20: mol_type = other DNA
agagagagaccatatggctt

SEQ ID NO: 41452 - DNA, 20 bp, synthetic construct
  source 1..20: mol_type = other DNA
gagagagagaccatatggct

SEQ ID NO: 41453 - DNA, 20 bp, synthetic construct
  source 1..20: mol_type = other DNA
tgagagagagaccatatggc

SEQ ID NO: 41454 - DNA, 20 bp, synthetic construct
  source 1..20: mol_type = other DNA
ttgagagagagaccatatgg

SEQ ID NO: 41455 - DNA, 20 bp, synthetic construct
  source 1..20: mol_type = other DNA
attgagagagagaccatatg

SEQ ID NO: 41456 - DNA, 20 bp, synthetic construct
  source 1..20: mol_type = other DNA
cattgagagagagaccatat

SEQ ID NO: 41457 - DNA, 20 bp, synthetic construct
  source 1..20: mol_type = other DNA
tcattgagagagagaccata

SEQ ID NO: 41458 - DNA, 20 bp, synthetic construct
  source 1..20: mol_type = other DNA
gtcattgagagagagaccat

SEQ ID NO: 41459 - DNA, 20 bp, synthetic construct
  source 1..20: mol_type = other DNA
agtcattgagagagagacca

SEQ ID NO: 41460 - DNA, 20 bp, synthetic construct
  source 1..20: mol_type = other DNA
gagtcattgagagagagacc

SEQ ID NO: 41461 - DNA, 20 bp, synthetic construct
  source 1..20: mol_type = other DNA
tgagtcattgagagagagac

SEQ ID NO: 41462 - DNA, 20 bp, synthetic construct
  source 1..20: mol_type = other DNA
ctgagtcattgagagagaga

SEQ ID NO: 41463 - DNA, 20 bp, synthetic construct
  source 1..20: mol_type = other DNA
gctgagtcattgagagagag

SEQ ID NO: 41464 - DNA, 20 bp, synthetic construct
  source 1..20: mol_type = other DNA
agctgagtcattgagagaga

SEQ ID NO: 41465 - DNA, 20 bp, synthetic construct
  source 1..20: mol_type = other DNA
gagctgagtcattgagagag

SEQ ID NO: 41466 - DNA, 20 bp, synthetic construct
  source 1..20: mol_type = other DNA
agagctgagtcattgagaga

SEQ ID NO: 41467 - DNA, 20 bp, synthetic construct
  source 1..20: mol_type = other DNA
aagagctgagtcattgagag

SEQ ID NO: 41468 - DNA, 20 bp, synthetic construct
  source 1..20: mol_type = other DNA
gaagagctgagtcattgaga

SEQ ID NO: 41469 - DNA, 20 bp, synthetic construct
  source 1..20: mol_type = other DNA
ggaagagctgagtcattgag

SEQ ID NO: 41470 - DNA, 20 bp, synthetic construct
  source 1..20: mol_type = other DNA
tggaagagctgagtcattga

SEQ ID NO: 41471 - DNA, 20 bp, synthetic construct
  source 1..20: mol_type = other DNA
atggaagagctgagtcattg

SEQ ID NO: 41472 - DNA, 20 bp, synthetic construct
  source 1..20: mol_type = other DNA
aatggaagagctgagtcatt

SEQ ID NO: 41473 - DNA, 20 bp, synthetic construct
  source 1..20: mol_type = other DNA
taatggaagagctgagtcat

SEQ ID NO: 41474 - DNA, 20 bp, synthetic construct
  source 1..20: mol_type = other DNA
ataatggaagagctgagtca

SEQ ID NO: 41475 - DNA, 20 bp, synthetic construct
  source 1..20: mol_type = other DNA
tataatggaagagctgagtc

SEQ ID NO: 41476 - DNA, 20 bp, synthetic construct
  source 1..20: mol_type = other DNA
gtataatggaagagctgagt

SEQ ID NO: 41477 - DNA, 20 bp, synthetic construct
  source 1..20: mol_type = other DNA
ggtataatggaagagctgag

SEQ ID NO: 41478 - DNA, 20 bp, synthetic construct
  source 1..20: mol_type = other DNA
tggtataatggaagagctga

SEQ ID NO: 41479 - DNA, 20 bp, synthetic construct
  source 1..20: mol_type = other DNA
atggtataatggaagagctg

SEQ ID NO: 41480 - DNA, 20 bp, synthetic construct
  source 1..20: mol_type = other DNA
catggtataatggaagagct

SEQ ID NO: 41481 - DNA, 20 bp, synthetic construct
  source 1..20: mol_type = other DNA
tcatggtataatggaagagc

SEQ ID NO: 41482 - DNA, 20 bp, synthetic construct
  source 1..20: mol_type = other DNA
tactttcatggtataatgga

SEQ ID NO: 41483 - DNA, 20 bp, synthetic construct
  source 1..20: mol_type = other DNA
ctactttcatggtataatgg

SEQ ID NO: 41484 - DNA, 20 bp, synthetic construct
  source 1..20: mol_type = other DNA
gctactttcatggtataatg

SEQ ID NO: 41485 - DNA, 20 bp, synthetic construct
  source 1..20: mol_type = other DNA
ggctactttcatggtataat

SEQ ID NO: 41486 - DNA, 20 bp, synthetic construct
  source 1..20: mol_type = other DNA
tggctactttcatggtataa

SEQ ID NO: 41487 - DNA, 20 bp, synthetic construct
  source 1..20: mol_type = other DNA
ctggctactttcatggtata

SEQ ID NO: 41488 - DNA, 20 bp, synthetic construct
  source 1..20: mol_type = other DNA
tctggctactttcatggtat

SEQ ID NO: 41489 - DNA, 20 bp, synthetic construct
  source 1..20: mol_type = other DNA
ctctggctactttcatggta

SEQ ID NO: 41490 - DNA, 20 bp, synthetic construct
  source 1..20: mol_type = other DNA
tctctggctactttcatggt

SEQ ID NO: 41491 - DNA, 20 bp, synthetic construct
  source 1..20: mol_type = other DNA
gtctctggctactttcatgg

SEQ ID NO: 41492 - DNA, 20 bp, synthetic construct
  source 1..20: mol_type = other DNA
cgtctctggctactttcatg

SEQ ID NO: 41493 - DNA, 20 bp, synthetic construct
  source 1..20: mol_type = other DNA
acgtctctggctactttcat

SEQ ID NO: 41494 - DNA, 20 bp, synthetic construct
  source 1..20: mol_type = other DNA
tctgacacagtctgcgtttg

SEQ ID NO: 41495 - DNA, 20 bp, synthetic construct
  source 1..20: mol_type = other DNA
gtctgacacagtctgcgttt

SEQ ID NO: 41496 - DNA, 20 bp, synthetic construct
  source 1..20: mol_type = other DNA
tgtctgacacagtctgcgtt

SEQ ID NO: 41497 - DNA, 20 bp, synthetic construct
  source 1..20: mol_type = other DNA
atgtctgacacagtctgcgt

SEQ ID NO: 41498 - DNA, 20 bp, synthetic construct
  source 1..20: mol_type = other DNA
tatgtctgacacagtctgcg

SEQ ID NO: 41499 - DNA, 20 bp, synthetic construct
  source 1..20: mol_type = other DNA
ctatgtctgacacagtctgc

SEQ ID NO: 41500 - DNA, 20 bp, synthetic construct
  source 1..20: mol_type = other DNA
actatgtctgacacagtctg

SEQ ID NO: 41501 - DNA, 20 bp, synthetic construct
  source 1..20: mol_type = other DNA
gactatgtctgacacagtct

SEQ ID NO: 41502 - DNA, 20 bp, synthetic construct
  source 1..20: mol_type = other DNA
ggactatgtctgacacagtc

SEQ ID NO: 41503 - DNA, 20 bp, synthetic construct
  source 1..20: mol_type = other DNA
tggactatgtctgacacagt

SEQ ID NO: 41504 - DNA, 20 bp, synthetic construct
  source 1..20: mol_type = other DNA
atggactatgtctgacacag

SEQ ID NO: 41505 - DNA, 20 bp, synthetic construct
  source 1..20: mol_type = other DNA
catggactatgtctgacaca

SEQ ID NO: 41506 - DNA, 20 bp, synthetic construct
  source 1..20: mol_type = other DNA
acatggactatgtctgacac

SEQ ID NO: 41507 - DNA, 20 bp, synthetic construct
  source 1..20: mol_type = other DNA
tacatggactatgtctgaca

SEQ ID NO: 41508 - DNA, 20 bp, synthetic construct
  source 1..20: mol_type = other DNA
atacatggactatgtctgac

SEQ ID NO: 41509 - DNA, 20 bp, synthetic construct
  source 1..20: mol_type = other DNA
catacatggactatgtctga

SEQ ID NO: 41510 - DNA, 20 bp, synthetic construct
  source 1..20: mol_type = other DNA
ccatacatggactatgtctg

SEQ ID NO: 41511 - DNA, 20 bp, synthetic construct
  source 1..20: mol_type = other DNA
accatacatggactatgtct

SEQ ID NO: 41512 - DNA, 20 bp, synthetic construct
  source 1..20: mol_type = other DNA
taccatacatggactatgtc

SEQ ID NO: 41513 - DNA, 20 bp, synthetic construct
  source 1..20: mol_type = other DNA
ctaccatacatggactatgt

SEQ ID NO: 41514 - DNA, 20 bp, synthetic construct
  source 1..20: mol_type = other DNA
actaccatacatggactatg

SEQ ID NO: 41515 - DNA, 20 bp, synthetic construct
  source 1..20: mol_type = other DNA
ttctaaaacaaggtgtggca

SEQ ID NO: 41516 - DNA, 20 bp, synthetic construct
  source 1..20: mol_type = other DNA
tttctaaaacaaggtgtggc

SEQ ID NO: 41517 - DNA, 20 bp, synthetic construct
  source 1..20: mol_type = other DNA
ctttctaaaacaaggtgtgg

SEQ ID NO: 41518 - DNA, 20 bp, synthetic construct
  source 1..20: mol_type = other DNA
gctttctaaaacaaggtgtg

SEQ ID NO: 41519 - DNA, 20 bp, synthetic construct
  source 1..20: mol_type = other DNA
agctttctaaaacaaggtgt

SEQ ID NO: 41520 - DNA, 20 bp, synthetic construct
  source 1..20: mol_type = other DNA
gagctttctaaaacaaggtg

SEQ ID NO: 41521 - DNA, 20 bp, synthetic construct
  source 1..20: mol_type = other DNA
cctgagctttctaaaacaag

SEQ ID NO: 41522 - DNA, 20 bp, synthetic construct
  source 1..20: mol_type = other DNA
acctgagctttctaaaacaa

SEQ ID NO: 41523 - DNA, 20 bp, synthetic construct
  source 1..20: mol_type = other DNA
aacctgagctttctaaaaca

SEQ ID NO: 41524 - DNA, 20 bp, synthetic construct
  source 1..20: mol_type = other DNA
cataaacctgagctttctaa

SEQ ID NO: 41525 - DNA, 20 bp, synthetic construct
  source 1..20: mol_type = other DNA
tcataaacctgagctttcta

SEQ ID NO: 41526 - DNA, 20 bp, synthetic construct
  source 1..20: mol_type = other DNA
atcataaacctgagctttct

SEQ ID NO: 41527 - DNA, 20 bp, synthetic construct
  source 1..20: mol_type = other DNA
catcataaacctgagctttc

SEQ ID NO: 41528 - DNA, 20 bp, synthetic construct
  source 1..20: mol_type = other DNA
acatcataaacctgagcttt

SEQ ID NO: 41529 - DNA, 20 bp, synthetic construct
  source 1..20: mol_type = other DNA
cacatcataaacctgagctt

SEQ ID NO: 41530 - DNA, 20 bp, synthetic construct
  source 1..20: mol_type = other DNA
tcacatcataaacctgagct

SEQ ID NO: 41531 - DNA, 20 bp, synthetic construct
  source 1..20: mol_type = other DNA
atcacatcataaacctgagc

SEQ ID NO: 41532 - DNA, 20 bp, synthetic construct
  source 1..20: mol_type = other DNA
catcacatcataaacctgag

SEQ ID NO: 41533 - DNA, 20 bp, synthetic construct
  source 1..20: mol_type = other DNA
ccatcacatcataaacctga

SEQ ID NO: 41534 - DNA, 20 bp, synthetic construct
  source 1..20: mol_type = other DNA
tccatcacatcataaacctg

SEQ ID NO: 41535 - DNA, 20 bp, synthetic construct
  source 1..20: mol_type = other DNA
ctccatcacatcataaacct

SEQ ID NO: 41536 - DNA, 20 bp, synthetic construct
  source 1..20: mol_type = other DNA
tctccatcacatcataaacc

SEQ ID NO: 41537 - DNA, 20 bp, synthetic construct
  source 1..20: mol_type = other DNA
ttctccatcacatcataaac

SEQ ID NO: 41538 - DNA, 20 bp, synthetic construct
  source 1..20: mol_type = other DNA
attctccatcacatcataaa

SEQ ID NO: 41539 - DNA, 20 bp, synthetic construct
  source 1..20: mol_type = other DNA
aattctccatcacatcataa

SEQ ID NO: 41540 - DNA, 20 bp, synthetic construct
  source 1..20: mol_type = other DNA
gaattctccatcacatcata

SEQ ID NO: 41541 - DNA, 20 bp, synthetic construct
  source 1..20: mol_type = other DNA
ggaattctccatcacatcat

SEQ ID NO: 41542 - DNA, 20 bp, synthetic construct
  source 1..20: mol_type = other DNA
aggaattctccatcacatca

SEQ ID NO: 41543 - DNA, 20 bp, synthetic construct
  source 1..20: mol_type = other DNA
taggaattctccatcacatc

SEQ ID NO: 41544 - DNA, 20 bp, synthetic construct
  source 1..20: mol_type = other DNA
gtaggaattctccatcacat

SEQ ID NO: 41545 - DNA, 20 bp, synthetic construct
  source 1..20: mol_type = other DNA
tgtaggaattctccatcaca

SEQ ID NO: 41546 - DNA, 20 bp, synthetic construct
  source 1..20: mol_type = other DNA
ttgtaggaattctccatcac

SEQ ID NO: 41547 - DNA, 20 bp, synthetic construct
  source 1..20: mol_type = other DNA
cttgtaggaattctccatca

SEQ ID NO: 41548 - DNA, 20 bp, synthetic construct
  source 1..20: mol_type = other DNA
tcttgtaggaattctccatc

SEQ ID NO: 41549 - DNA, 20 bp, synthetic construct
  source 1..20: mol_type = other DNA
ctcttgtaggaattctccat

SEQ ID NO: 41550 - DNA, 20 bp, synthetic construct
  source 1..20: mol_type = other DNA
actcttgtaggaattctcca

SEQ ID NO: 41551 - DNA, 20 bp, synthetic construct
  source 1..20: mol_type = other DNA
aactcttgtaggaattctcc

SEQ ID NO: 41552 - DNA, 20 bp, synthetic construct
  source 1..20: mol_type = other DNA
gaactcttgtaggaattctc

SEQ ID NO: 41553 - DNA, 20 bp, synthetic construct
  source 1..20: mol_type = other DNA
agaactcttgtaggaattct

SEQ ID NO: 41554 - DNA, 20 bp, synthetic construct
  source 1..20: mol_type = other DNA
gttcactctaccatttaaaa

SEQ ID NO: 41555 - DNA, 20 bp, synthetic construct
  source 1..20: mol_type = other DNA
tgttcactctaccatttaaa

SEQ ID NO: 41556 - DNA, 20 bp, synthetic construct
  source 1..20: mol_type = other DNA
atgttcactctaccatttaa

SEQ ID NO: 41557 - DNA, 20 bp, synthetic construct
  source 1..20: mol_type = other DNA
tatgttcactctaccattta

SEQ ID NO: 41558 - DNA, 20 bp, synthetic construct
  source 1..20: mol_type = other DNA
gtatgttcactctaccattt

SEQ ID NO: 41559 - DNA, 20 bp, synthetic construct
  source 1..20: mol_type = other DNA
tgtatgttcactctaccatt

SEQ ID NO: 41560 - DNA, 20 bp, synthetic construct
  source 1..20: mol_type = other DNA
gtgtatgttcactctaccat

SEQ ID NO: 41561 - DNA, 20 bp, synthetic construct
  source 1..20: mol_type = other DNA
agtgtatgttcactctacca

SEQ ID NO: 41562 - DNA, 20 bp, synthetic construct
  source 1..20: mol_type = other DNA
cagtgtatgttcactctacc

SEQ ID NO: 41563 - DNA, 20 bp, synthetic construct
  source 1..20: mol_type = other DNA
ccagtgtatgttcactctac

SEQ ID NO: 41564 - DNA, 20 bp, synthetic construct
  source 1..20: mol_type = other DNA
tccagtgtatgttcactcta

SEQ ID NO: 41565 - DNA, 20 bp, synthetic construct
  source 1..20: mol_type = other DNA
ttccagtgtatgttcactct

SEQ ID NO: 41566 - DNA, 20 bp, synthetic construct
  source 1..20: mol_type = other DNA
attccagtgtatgttcactc

SEQ ID NO: 41567 - DNA, 20 bp, synthetic construct
  source 1..20: mol_type = other DNA
aattccagtgtatgttcact

SEQ ID NO: 41568 - DNA, 20 bp, synthetic construct
  source 1..20: mol_type = other DNA
gaattccagtgtatgttcac

SEQ ID NO: 41569 - DNA, 20 bp, synthetic construct
  source 1..20: mol_type = other DNA
agaattccagtgtatgttca

SEQ ID NO: 41570 - DNA, 20 bp, synthetic construct
  source 1..20: mol_type = other DNA
tagaattccagtgtatgttc

SEQ ID NO: 41571 - DNA, 20 bp, synthetic construct
  source 1..20: mol_type = other DNA
atagaattccagtgtatgtt

SEQ ID NO: 41572 - DNA, 20 bp, synthetic construct
  source 1..20: mol_type = other DNA
tatagaattccagtgtatgt

SEQ ID NO: 41573 - DNA, 20 bp, synthetic construct
  source 1..20: mol_type = other DNA
gtatagaattccagtgtatg

SEQ ID NO: 41574 - DNA, 20 bp, synthetic construct
  source 1..20: mol_type = other DNA
agtatagaattccagtgtat

SEQ ID NO: 41575 - DNA, 20 bp, synthetic construct
  source 1..20: mol_type = other DNA
cagtatagaattccagtgta

SEQ ID NO: 41576 - DNA, 20 bp, synthetic construct
  source 1..20: mol_type = other DNA
gcagtatagaattccagtgt

SEQ ID NO: 41577 - DNA, 20 bp, synthetic construct
  source 1..20: mol_type = other DNA
agcagtatagaattccagtg

SEQ ID NO: 41578 - DNA, 20 bp, synthetic construct
  source 1..20: mol_type = other DNA
aagcagtatagaattccagt

SEQ ID NO: 41579 - DNA, 20 bp, synthetic construct
  source 1..20: mol_type = other DNA
caagcagtatagaattccag

SEQ ID NO: 41580 - DNA, 20 bp, synthetic construct
  source 1..20: mol_type = other DNA
tcaagcagtatagaattcca

SEQ ID NO: 41581 - DNA, 20 bp, synthetic construct
  source 1..20: mol_type = other DNA
gtcaagcagtatagaattcc

SEQ ID NO: 41582 - DNA, 20 bp, synthetic construct
  source 1..20: mol_type = other DNA
ggtcaagcagtatagaattc

SEQ ID NO: 41583 - DNA, 20 bp, synthetic construct
  source 1..20: mol_type = other DNA
gggtcaagcagtatagaatt

SEQ ID NO: 41584 - DNA, 20 bp, synthetic construct
  source 1..20: mol_type = other DNA
tgggtcaagcagtatagaat

SEQ ID NO: 41585 - DNA, 20 bp, synthetic construct
  source 1..20: mol_type = other DNA
ttgggtcaagcagtatagaa

SEQ ID NO: 41586 - DNA, 20 bp, synthetic construct
  source 1..20: mol_type = other DNA
cttgggtcaagcagtataga

SEQ ID NO: 41587 - DNA, 20 bp, synthetic construct
  source 1..20: mol_type = other DNA
gcttgggtcaagcagtatag

SEQ ID NO: 41588 - DNA, 20 bp, synthetic construct
  source 1..20: mol_type = other DNA
agcttgggtcaagcagtata

SEQ ID NO: 41589 - DNA, 20 bp, synthetic construct
  source 1..20: mol_type = other DNA
aagcttgggtcaagcagtat

SEQ ID NO: 41590 - DNA, 20 bp, synthetic construct
  source 1..20: mol_type = other DNA
aaagcttgggtcaagcagta

SEQ ID NO: 41591 - DNA, 20 bp, synthetic construct
  source 1..20: mol_type = other DNA
aaaagcttgggtcaagcagt

SEQ ID NO: 41592 - DNA, 20 bp, synthetic construct
  source 1..20: mol_type = other DNA
caaaagcttgggtcaagcag

SEQ ID NO: 41593 - DNA, 20 bp, synthetic construct
  source 1..20: mol_type = other DNA
tcaaaagcttgggtcaagca

SEQ ID NO: 41594 - DNA, 20 bp, synthetic construct
  source 1..20: mol_type = other DNA
atcaaaagcttgggtcaagc

SEQ ID NO: 41595 - DNA, 20 bp, synthetic construct
  source 1..20: mol_type = other DNA
tatcaaaagcttgggtcaag

SEQ ID NO: 41596 - DNA, 20 bp, synthetic construct
  source 1..20: mol_type = other DNA
ctatcaaaagcttgggtcaa

SEQ ID NO: 41597 - DNA, 20 bp, synthetic construct
  source 1..20: mol_type = other DNA
gctatcaaaagcttgggtca

SEQ ID NO: 41598 - DNA, 20 bp, synthetic construct
  source 1..20: mol_type = other DNA
tgctatcaaaagcttgggtc

SEQ ID NO: 41599 - DNA, 20 bp, synthetic construct
  source 1..20: mol_type = other DNA
ttgctatcaaaagcttgggt

SEQ ID NO: 41600 - DNA, 20 bp, synthetic construct
  source 1..20: mol_type = other DNA
tttgctatcaaaagcttggg

SEQ ID NO: 41601 - DNA, 20 bp, synthetic construct
  source 1..20: mol_type = other DNA
ttttgctatcaaaagcttgg

SEQ ID NO: 41602 - DNA, 20 bp, synthetic construct
  source 1..20: mol_type = other DNA
cttttgctatcaaaagcttg

SEQ ID NO: 41603 - DNA, 20 bp, synthetic construct
  source 1..20: mol_type = other DNA
ccttttgctatcaaaagctt

SEQ ID NO: 41604 - DNA, 20 bp, synthetic construct
  source 1..20: mol_type = other DNA
accttttgctatcaaaagct

SEQ ID NO: 41605 - DNA, 20 bp, synthetic construct
  source 1..20: mol_type = other DNA
taccttttgctatcaaaagc

SEQ ID NO: 41606 - DNA, 20 bp, synthetic construct
  source 1..20: mol_type = other DNA
ctaccttttgctatcaaaag

SEQ ID NO: 41607 - DNA, 20 bp, synthetic construct
  source 1..20: mol_type = other DNA
tctaccttttgctatcaaaa

SEQ ID NO: 41608 - DNA, 20 bp, synthetic construct
  source 1..20: mol_type = other DNA
ttctaccttttgctatcaaa

SEQ ID NO: 41609 - DNA, 20 bp, synthetic construct
  source 1..20: mol_type = other DNA
tttctaccttttgctatcaa

SEQ ID NO: 41610 - DNA, 20 bp, synthetic construct
  source 1..20: mol_type = other DNA
ttttctaccttttgctatca

SEQ ID NO: 41611 - DNA, 20 bp, synthetic construct
  source 1..20: mol_type = other DNA
cttttctaccttttgctatc

SEQ ID NO: 41612 - DNA, 20 bp, synthetic construct
  source 1..20: mol_type = other DNA
tcttttctaccttttgctat

SEQ ID NO: 41613 - DNA, 20 bp, synthetic construct
  source 1..20: mol_type = other DNA
gtcttttctaccttttgcta

SEQ ID NO: 41614 - DNA, 20 bp, synthetic construct
  source 1..20: mol_type = other DNA
tgtcttttctaccttttgct

SEQ ID NO: 41615 - DNA, 20 bp, synthetic construct
  source 1..20: mol_type = other DNA
ctgtcttttctaccttttgc

SEQ ID NO: 41616 - DNA, 20 bp, synthetic construct
  source 1..20: mol_type = other DNA
tctgtcttttctaccttttg

SEQ ID NO: 41617 - DNA, 20 bp, synthetic construct
  source 1..20: mol_type = other DNA
atctgtcttttctacctttt

SEQ ID NO: 41618 - DNA, 20 bp, synthetic construct
  source 1..20: mol_type = other DNA
tatctgtcttttctaccttt

SEQ ID NO: 41619 - DNA, 20 bp, synthetic construct
  source 1..20: mol_type = other DNA
aacaccctgagctatgacta

SEQ ID NO: 41620 - DNA, 20 bp, synthetic construct
  source 1..20: mol_type = other DNA
aaacaccctgagctatgact

SEQ ID NO: 41621 - DNA, 20 bp, synthetic construct
  source 1..20: mol_type = other DNA
caaacaccctgagctatgac

SEQ ID NO: 41622 - DNA, 20 bp, synthetic construct
  source 1..20: mol_type = other DNA
tcaaacaccctgagctatga

SEQ ID NO: 41623 - DNA, 20 bp, synthetic construct
  source 1..20: mol_type = other DNA
gtcaaacaccctgagctatg

SEQ ID NO: 41624 - DNA, 20 bp, synthetic construct
  source 1..20: mol_type = other DNA
agtcaaacaccctgagctat

SEQ ID NO: 41625 - DNA, 20 bp, synthetic construct
  source 1..20: mol_type = other DNA
aagtcaaacaccctgagcta

SEQ ID NO: 41626 - DNA, 20 bp, synthetic construct
  source 1..20: mol_type = other DNA
gaagtcaaacaccctgagct

SEQ ID NO: 41627 - DNA, 20 bp, synthetic construct
  source 1..20: mol_type = other DNA
agaagtcaaacaccctgagc

SEQ ID NO: 41628 - DNA, 20 bp, synthetic construct
  source 1..20: mol_type = other DNA
aagaagtcaaacaccctgag

SEQ ID NO: 41629 - DNA, 20 bp, synthetic construct
  source 1..20: mol_type = other DNA
gaagaagtcaaacaccctga

SEQ ID NO: 41630 - DNA, 20 bp, synthetic construct
  source 1..20: mol_type = other DNA
ggaagaagtcaaacaccctg

SEQ ID NO: 41631 - DNA, 20 bp, synthetic construct
  source 1..20: mol_type = other DNA
aggaagaagtcaaacaccct

SEQ ID NO: 41632 - DNA, 20 bp, synthetic construct
  source 1..20: mol_type = other DNA
gaggaagaagtcaaacaccc

SEQ ID NO: 41633 - DNA, 20 bp, synthetic construct
  source 1..20: mol_type = other DNA
agaggaagaagtcaaacacc

SEQ ID NO: 41634 - DNA, 20 bp, synthetic construct
  source 1..20: mol_type = other DNA
ccccacagaaaagcaaacaa

SEQ ID NO: 41635 - DNA, 20 bp, synthetic construct
  source 1..20: mol_type = other DNA
accccacagaaaagcaaaca

SEQ ID NO: 41636 - DNA, 20 bp, synthetic construct
  source 1..20: mol_type = other DNA
aaccccacagaaaagcaaac

SEQ ID NO: 41637 - DNA, 20 bp, synthetic construct
  source 1..20: mol_type = other DNA
gcagtgaaagggaatttttt

SEQ ID NO: 41638 - DNA, 20 bp, synthetic construct
  source 1..20: mol_type = other DNA
agcagtgaaagggaattttt

SEQ ID NO: 41639 - DNA, 20 bp, synthetic construct
  source 1..20: mol_type = other DNA
gctgtgacaaaaaagcagtg

SEQ ID NO: 41640 - DNA, 20 bp, synthetic construct
  source 1..20: mol_type = other DNA
tgctgtgacaaaaaagcagt

SEQ ID NO: 41641 - DNA, 20 bp, synthetic construct
  source 1..20: mol_type = other DNA
gctgctgtgacaaaaaagca

SEQ ID NO: 41642 - DNA, 20 bp, synthetic construct
  source 1..20: mol_type = other DNA
ggctgctgtgacaaaaaagc

SEQ ID NO: 41643 - DNA, 20 bp, synthetic construct
  source 1..20: mol_type = other DNA
aggctgctgtgacaaaaaag

SEQ ID NO: 41644 - DNA, 20 bp, synthetic construct
  source 1..20: mol_type = other DNA
caaaggctgctgtgacaaaa

SEQ ID NO: 41645 - DNA, 20 bp, synthetic construct
  source 1..20: mol_type = other DNA
acaaaggctgctgtgacaaa

SEQ ID NO: 41646 - DNA, 20 bp, synthetic construct
  source 1..20: mol_type = other DNA
gacaaaggctgctgtgacaa

SEQ ID NO: 41647 - DNA, 20 bp, synthetic construct
  source 1..20: mol_type = other DNA
cgacaaaggctgctgtgaca

SEQ ID NO: 41648 - DNA, 20 bp, synthetic construct
  source 1..20: mol_type = other DNA
gcgacaaaggctgctgtgac

SEQ ID NO: 41649 - DNA, 20 bp, synthetic construct
  source 1..20: mol_type = other DNA
agcgacaaaggctgctgtga

SEQ ID NO: 41650 - DNA, 20 bp, synthetic construct
  source 1..20: mol_type = other DNA
aagcgacaaaggctgctgtg

SEQ ID NO: 41651 - DNA, 20 bp, synthetic construct
  source 1..20: mol_type = other DNA
gaagcgacaaaggctgctgt

SEQ ID NO: 41652 - DNA, 20 bp, synthetic construct
  source 1..20: mol_type = other DNA
tgaagcgacaaaggctgctg

SEQ ID NO: 41653 - DNA, 20 bp, synthetic construct
  source 1..20: mol_type = other DNA
ttgaagcgacaaaggctgct

SEQ ID NO: 41654 - DNA, 20 bp, synthetic construct
  source 1..20: mol_type = other DNA
tttgaagcgacaaaggctgc

SEQ ID NO: 41655 - DNA, 20 bp, synthetic construct
  source 1..20: mol_type = other DNA
gtttgaagcgacaaaggctg

SEQ ID NO: 41656 - DNA, 20 bp, synthetic construct
  source 1..20: mol_type = other DNA
tgtttgaagcgacaaaggct

SEQ ID NO: 41657 - DNA, 20 bp, synthetic construct
  source 1..20: mol_type = other DNA
gtgtttgaagcgacaaaggc

SEQ ID NO: 41658 - DNA, 20 bp, synthetic construct
  source 1..20: mol_type = other DNA
ggtgtttgaagcgacaaagg

SEQ ID NO: 41659 - DNA, 20 bp, synthetic construct
  source 1..20: mol_type = other DNA
cggtgtttgaagcgacaaag

SEQ ID NO: 41660 - DNA, 20 bp, synthetic construct
  source 1..20: mol_type = other DNA
gcggtgtttgaagcgacaaa

SEQ ID NO: 41661 - DNA, 20 bp, synthetic construct
  source 1..20: mol_type = other DNA
tgcggtgtttgaagcgacaa

SEQ ID NO: 41662 - DNA, 20 bp, synthetic construct
  source 1..20: mol_type = other DNA
ttgcggtgtttgaagcgaca

SEQ ID NO: 41663 - DNA, 20 bp, synthetic construct
  source 1..20: mol_type = other DNA
cttgcggtgtttgaagcgac

SEQ ID NO: 41664 - DNA, 20 bp, synthetic construct
  source 1..20: mol_type = other DNA
acttgcggtgtttgaagcga

SEQ ID NO: 41665 - DNA, 20 bp, synthetic construct
  source 1..20: mol_type = other DNA
cacttgcggtgtttgaagcg

SEQ ID NO: 41666 - DNA, 20 bp, synthetic construct
  source 1..20: mol_type = other DNA
acacttgcggtgtttgaagc

SEQ ID NO: 41667 - DNA, 20 bp, synthetic construct
  source 1..20: mol_type = other DNA
aacacttgcggtgtttgaag

SEQ ID NO: 41668 - DNA, 20 bp, synthetic construct
  source 1..20: mol_type = other DNA
gaacacttgcggtgtttgaa

SEQ ID NO: 41669 - DNA, 20 bp, synthetic construct
  source 1..20: mol_type = other DNA
agaacacttgcggtgtttga

SEQ ID NO: 41670 - DNA, 20 bp, synthetic construct
  source 1..20: mol_type = other DNA
aagaacacttgcggtgtttg

SEQ ID NO: 41671 - DNA, 20 bp, synthetic construct
  source 1..20: mol_type = other DNA
aaagaacacttgcggtgttt

SEQ ID NO: 41672 - DNA, 20 bp, synthetic construct
  source 1..20: mol_type = other DNA
aaaagaacacttgcggtgtt

SEQ ID NO: 41673 - DNA, 20 bp, synthetic construct
  source 1..20: mol_type = other DNA
taaaagaacacttgcggtgt

SEQ ID NO: 41674 - DNA, 20 bp, synthetic construct
  source 1..20: mol_type = other DNA
catttcacttgaaaggttga

SEQ ID NO: 41675 - DNA, 20 bp, synthetic construct
  source 1..20: mol_type = other DNA
gcatttcacttgaaaggttg

SEQ ID NO: 41676 - DNA, 20 bp, synthetic construct
  source 1..20: mol_type = other DNA
tgcatttcacttgaaaggtt

SEQ ID NO: 41677 - DNA, 20 bp, synthetic construct
  source 1..20: mol_type = other DNA
ttgcatttcacttgaaaggt

SEQ ID NO: 41678 - DNA, 20 bp, synthetic construct
  source 1..20: mol_type = other DNA
gttgcatttcacttgaaagg

SEQ ID NO: 41679 - DNA, 20 bp, synthetic construct
  source 1..20: mol_type = other DNA
tgttgcatttcacttgaaag

SEQ ID NO: 41680 - DNA, 20 bp, synthetic construct
  source 1..20: mol_type = other DNA
atgttgcatttcacttgaaa

SEQ ID NO: 41681 - DNA, 20 bp, synthetic construct
  source 1..20: mol_type = other DNA
catgttgcatttcacttgaa

SEQ ID NO: 41682 - DNA, 20 bp, synthetic construct
  source 1..20: mol_type = other DNA
acatgttgcatttcacttga

SEQ ID NO: 41683 - DNA, 20 bp, synthetic construct
  source 1..20: mol_type = other DNA
gacatgttgcatttcacttg

SEQ ID NO: 41684 - DNA, 20 bp, synthetic construct
  source 1..20: mol_type = other DNA
agacatgttgcatttcactt

SEQ ID NO: 41685 - DNA, 20 bp, synthetic construct
  source 1..20: mol_type = other DNA
cagacatgttgcatttcact

SEQ ID NO: 41686 - DNA, 20 bp, synthetic construct
  source 1..20: mol_type = other DNA
tcagacatgttgcatttcac

SEQ ID NO: 41687 - DNA, 20 bp, synthetic construct
  source 1..20: mol_type = other DNA
ttcagacatgttgcatttca

SEQ ID NO: 41688 - DNA, 20 bp, synthetic construct
  source 1..20: mol_type = other DNA
tttcagacatgttgcatttc

SEQ ID NO: 41689 - DNA, 20 bp, synthetic construct
  source 1..20: mol_type = other DNA
gtttcagacatgttgcattt

SEQ ID NO: 41690 - DNA, 20 bp, synthetic construct
  source 1..20: mol_type = other DNA
cgtttcagacatgttgcatt

SEQ ID NO: 41691 - DNA, 20 bp, synthetic construct
  source 1..20: mol_type = other DNA
acgtttcagacatgttgcat

SEQ ID NO: 41692 - DNA, 20 bp, synthetic construct
  source 1..20: mol_type = other DNA
cacgtttcagacatgttgca

SEQ ID NO: 41693 - DNA, 20 bp, synthetic construct
  source 1..20: mol_type = other DNA
ccacgtttcagacatgttgc

SEQ ID NO: 41694 - DNA, 20 bp, synthetic construct
  source 1..20: mol_type = other DNA
accacgtttcagacatgttg

SEQ ID NO: 41695 - DNA, 20 bp, synthetic construct
  source 1..20: mol_type = other DNA
taccacgtttcagacatgtt

SEQ ID NO: 41696 - DNA, 20 bp, synthetic construct
  source 1..20: mol_type = other DNA
ataccacgtttcagacatgt

SEQ ID NO: 41697 - DNA, 20 bp, synthetic construct
  source 1..20: mol_type = other DNA
gataccacgtttcagacatg

SEQ ID NO: 41698 - DNA, 20 bp, synthetic construct
  source 1..20: mol_type = other DNA
agataccacgtttcagacat

SEQ ID NO: 41699 - DNA, 20 bp, synthetic construct
  source 1..20: mol_type = other DNA
cagataccacgtttcagaca

SEQ ID NO: 41700 - DNA, 20 bp, synthetic construct
  source 1..20: mol_type = other DNA
ccagataccacgtttcagac

SEQ ID NO: 41701 - DNA, 20 bp, synthetic construct
  source 1..20: mol_type = other DNA
tccagataccacgtttcaga

SEQ ID NO: 41702 - DNA, 20 bp, synthetic construct
  source 1..20: mol_type = other DNA
ctccagataccacgtttcag

SEQ ID NO: 41703 - DNA, 20 bp, synthetic construct
  source 1..20: mol_type = other DNA
tctccagataccacgtttca

SEQ ID NO: 41704 - DNA, 20 bp, synthetic construct
  source 1..20: mol_type = other DNA
ctctccagataccacgtttc

SEQ ID NO: 41705 - DNA, 20 bp, synthetic construct
  source 1..20: mol_type = other DNA
cctctccagataccacgttt

SEQ ID NO: 41706 - DNA, 20 bp, synthetic construct
  source 1..20: mol_type = other DNA
acctctccagataccacgtt

SEQ ID NO: 41707 - DNA, 20 bp, synthetic construct
  source 1..20: mol_type = other DNA
cacctctccagataccacgt

SEQ ID NO: 41708 - DNA, 20 bp, synthetic construct
  source 1..20: mol_type = other DNA
tcacctctccagataccacg

SEQ ID NO: 41709 - DNA, 20 bp, synthetic construct
  source 1..20: mol_type = other DNA
ctcacctctccagataccac

SEQ ID NO: 41710 - DNA, 20 bp, synthetic construct
  source 1..20: mol_type = other DNA
tctcacctctccagatacca

SEQ ID NO: 41711 - DNA, 20 bp, synthetic construct
  source 1..20: mol_type = other DNA
atctcacctctccagatacc

SEQ ID NO: 41712 - DNA, 20 bp, synthetic construct
  source 1..20: mol_type = other DNA
catctcacctctccagatac

SEQ ID NO: 41713 - DNA, 20 bp, synthetic construct
  source 1..20: mol_type = other DNA
ccatctcacctctccagata

SEQ ID NO: 41714 - DNA, 20 bp, synthetic construct
  source 1..20: mol_type = other DNA
tccatctcacctctccagat

SEQ ID NO: 41715 - DNA, 20 bp, synthetic construct
  source 1..20: mol_type = other DNA
ctttgtccatctcacctctc

SEQ ID NO: 41716 - DNA, 20 bp, synthetic construct
  source 1..20: mol_type = other DNA
aagggctcctttgtccatct

SEQ ID NO: 41717 - DNA, 20 bp, synthetic construct
  source 1..20: mol_type = other DNA
caagggctcctttgtccatc

SEQ ID NO: 41718 - DNA, 20 bp, synthetic construct
  source 1..20: mol_type = other DNA
acaagggctcctttgtccat

SEQ ID NO: 41719 - DNA, 20 bp, synthetic construct
  source 1..20: mol_type = other DNA
aacaagggctcctttgtcca

SEQ ID NO: 41720 - DNA, 20 bp, synthetic construct
  source 1..20: mol_type = other DNA
taacaagggctcctttgtcc

SEQ ID NO: 41721 - DNA, 20 bp, synthetic construct
  source 1..20: mol_type = other DNA
gtaacaagggctcctttgtc

SEQ ID NO: 41722 - DNA, 20 bp, synthetic construct
  source 1..20: mol_type = other DNA
agtaacaagggctcctttgt

SEQ ID NO: 41723 - DNA, 20 bp, synthetic construct
  source 1..20: mol_type = other DNA
cagtaacaagggctcctttg

SEQ ID NO: 41724 - DNA, 20 bp, synthetic construct
  source 1..20: mol_type = other DNA
gcagtaacaagggctccttt

SEQ ID NO: 41725 - DNA, 20 bp, synthetic construct
  source 1..20: mol_type = other DNA
tgcagtaacaagggctcctt

SEQ ID NO: 41726 - DNA, 20 bp, synthetic construct
  source 1..20: mol_type = other DNA
gtgcagtaacaagggctcct

SEQ ID NO: 41727 - DNA, 20 bp, synthetic construct
  source 1..20: mol_type = other DNA
cgtgcagtaacaagggctcc

SEQ ID NO: 41728 - DNA, 20 bp, synthetic construct
  source 1..20: mol_type = other DNA
acgtgcagtaacaagggctc

SEQ ID NO: 41729 - DNA, 20 bp, synthetic construct
  source 1..20: mol_type = other DNA
aacgtgcagtaacaagggct

SEQ ID NO: 41730 - DNA, 20 bp, synthetic construct
  source 1..20: mol_type = other DNA
aaacgtgcagtaacaagggc

SEQ ID NO: 41731 - DNA, 20 bp, synthetic construct
  source 1..20: mol_type = other DNA
ggagaatgaaaacgtgcagt

SEQ ID NO: 41732 - DNA, 20 bp, synthetic construct
  source 1..20: mol_type = other DNA
ggtgaagtttggagaatgaa

SEQ ID NO: 41733 - DNA, 20 bp, synthetic construct
  source 1..20: mol_type = other DNA
aggtgaagtttggagaatga

SEQ ID NO: 41734 - DNA, 20 bp, synthetic construct
  source 1..20: mol_type = other DNA
caaggtgaagtttggagaat

SEQ ID NO: 41735 - DNA, 20 bp, synthetic construct
  source 1..20: mol_type = other DNA
gcaaggtgaagtttggagaa

SEQ ID NO: 41736 - DNA, 20 bp, synthetic construct
  source 1..20: mol_type = other DNA
tgcaaggtgaagtttggaga

SEQ ID NO: 41737 - DNA, 20 bp, synthetic construct
  source 1..20: mol_type = other DNA
gtgcaaggtgaagtttggag

SEQ ID NO: 41738 - DNA, 20 bp, synthetic construct
  source 1..20: mol_type = other DNA
tgtgcaaggtgaagtttgga

SEQ ID NO: 41739 - DNA, 20 bp, synthetic construct
  source 1..20: mol_type = other DNA
gtgtgcaaggtgaagtttgg

SEQ ID NO: 41740 - DNA, 20 bp, synthetic construct
  source 1..20: mol_type = other DNA
tgtgtgcaaggtgaagtttg

SEQ ID NO: 41741 - DNA, 20 bp, synthetic construct
  source 1..20: mol_type = other DNA
ctgtgtgcaaggtgaagttt

SEQ ID NO: 41742 - DNA, 20 bp, synthetic construct
  source 1..20: mol_type = other DNA
actgtgtgcaaggtgaagtt

SEQ ID NO: 41743 - DNA, 20 bp, synthetic construct
  source 1..20: mol_type = other DNA
tactgtgtgcaaggtgaagt

SEQ ID NO: 41744 - DNA, 20 bp, synthetic construct
  source 1..20: mol_type = other DNA
ttactgtgtgcaaggtgaag

SEQ ID NO: 41745 - DNA, 20 bp, synthetic construct
  source 1..20: mol_type = other DNA
gttactgtgtgcaaggtgaa

SEQ ID NO: 41746 - DNA, 20 bp, synthetic construct
  source 1..20: mol_type = other DNA
ttgtgcattgtctgttactg

SEQ ID NO: 41747 - DNA, 20 bp, synthetic construct
  source 1..20: mol_type = other DNA
tttgtgcattgtctgttact

SEQ ID NO: 41748 - DNA, 20 bp, synthetic construct
  source 1..20: mol_type = other DNA
atttgtgcattgtctgttac

SEQ ID NO: 41749 - DNA, 20 bp, synthetic construct
  source 1..20: mol_type = other DNA
gatttgtgcattgtctgtta

SEQ ID NO: 41750 - DNA, 20 bp, synthetic construct
  source 1..20: mol_type = other DNA
ggatttgtgcattgtctgtt

SEQ ID NO: 41751 - DNA, 20 bp, synthetic construct
  source 1..20: mol_type = other DNA
tggatttgtgcattgtctgt

SEQ ID NO: 41752 - DNA, 20 bp, synthetic construct
  source 1..20: mol_type = other DNA
gtggatttgtgcattgtctg

SEQ ID NO: 41753 - DNA, 20 bp, synthetic construct
  source 1..20: mol_type = other DNA
agtggatttgtgcattgtct

SEQ ID NO: 41754 - DNA, 20 bp, synthetic construct
  source 1..20: mol_type = other DNA
aagtggatttgtgcattgtc

SEQ ID NO: 41755 - DNA, 20 bp, synthetic construct
  source 1..20: mol_type = other DNA
gaagtggatttgtgcattgt

SEQ ID NO: 41756 - DNA, 20 bp, synthetic construct
  source 1..20: mol_type = other DNA
ggaagtggatttgtgcattg

SEQ ID NO: 41757 - DNA, 20 bp, synthetic construct
  source 1..20: mol_type = other DNA
aggaagtggatttgtgcatt

SEQ ID NO: 41758 - DNA, 20 bp, synthetic construct
  source 1..20: mol_type = other DNA
aaggaagtggatttgtgcat

SEQ ID NO: 41759 - DNA, 20 bp, synthetic construct
  source 1..20: mol_type = other DNA
taaggaagtggatttgtgca

SEQ ID NO: 41760 - DNA, 20 bp, synthetic construct
  source 1..20: mol_type = other DNA
ataaggaagtggatttgtgc

SEQ ID NO: 41761 - DNA, 20 bp, synthetic construct
  source 1..20: mol_type = other DNA
cataaggaagtggatttgtg

SEQ ID NO: 41762 - DNA, 20 bp, synthetic construct
  source 1..20: mol_type = other DNA
ccataaggaagtggatttgt

SEQ ID NO: 41763 - DNA, 20 bp, synthetic construct
  source 1..20: mol_type = other DNA
tccataaggaagtggatttg

SEQ ID NO: 41764 - DNA, 20 bp, synthetic construct
  source 1..20: mol_type = other DNA
gtccataaggaagtggattt

SEQ ID NO: 41765 - DNA, 20 bp, synthetic construct
  source 1..20: mol_type = other DNA
cgtccataaggaagtggatt

SEQ ID NO: 41766 - DNA, 20 bp, synthetic construct
  source 1..20: mol_type = other DNA
ccgtccataaggaagtggat

SEQ ID NO: 41767 - DNA, 20 bp, synthetic construct
  source 1..20: mol_type = other DNA
tccgtccataaggaagtgga

SEQ ID NO: 41768 - DNA, 20 bp, synthetic construct
  source 1..20: mol_type = other DNA
ttccgtccataaggaagtgg

SEQ ID NO: 41769 - DNA, 20 bp, synthetic construct
  source 1..20: mol_type = other DNA
tttccgtccataaggaagtg

SEQ ID NO: 41770 - DNA, 20 bp, synthetic construct
  source 1..20: mol_type = other DNA
atttccgtccataaggaagt

SEQ ID NO: 41771 - DNA, 20 bp, synthetic construct
  source 1..20: mol_type = other DNA
aatttccgtccataaggaag

SEQ ID NO: 41772 - DNA, 20 bp, synthetic construct
  source 1..20: mol_type = other DNA
gaatttccgtccataaggaa

SEQ ID NO: 41773 - DNA, 20 bp, synthetic construct
  source 1..20: mol_type = other DNA
agaatttccgtccataagga

SEQ ID NO: 41774 - DNA, 20 bp, synthetic construct
  source 1..20: mol_type = other DNA
cagaatttccgtccataagg

SEQ ID NO: 41775 - DNA, 20 bp, synthetic construct
  source 1..20: mol_type = other DNA
tcagaatttccgtccataag

SEQ ID NO: 41776 - DNA, 20 bp, synthetic construct
  source 1..20: mol_type = other DNA
ttcagaatttccgtccataa

SEQ ID NO: 41777 - DNA, 20 bp, synthetic construct
  source 1..20: mol_type = other DNA
tttcagaatttccgtccata

SEQ ID NO: 41778 - DNA, 20 bp, synthetic construct
  source 1..20: mol_type = other DNA
atttcagaatttccgtccat

SEQ ID NO: 41779 - DNA, 20 bp, synthetic construct
  source 1..20: mol_type = other DNA
gatttcagaatttccgtcca

SEQ ID NO: 41780 - DNA, 20 bp, synthetic construct
  source 1..20: mol_type = other DNA
ggatttcagaatttccgtcc

SEQ ID NO: 41781 - DNA, 20 bp, synthetic construct
  source 1..20: mol_type = other DNA
aggatttcagaatttccgtc

SEQ ID NO: 41782 - DNA, 20 bp, synthetic construct
  source 1..20: mol_type = other DNA
aaggatttcagaatttccgt

SEQ ID NO: 41783 - DNA, 20 bp, synthetic construct
  source 1..20: mol_type = other DNA
caggcataaaaggatttcag

SEQ ID NO: 41784 - DNA, 20 bp, synthetic construct
  source 1..20: mol_type = other DNA
ccaggcataaaaggatttca

SEQ ID NO: 41785 - DNA, 20 bp, synthetic construct
  source 1..20: mol_type = other DNA
gccaggcataaaaggatttc

SEQ ID NO: 41786 - DNA, 20 bp, synthetic construct
  source 1..20: mol_type = other DNA
ggccaggcataaaaggattt

SEQ ID NO: 41787 - DNA, 20 bp, synthetic construct
  source 1..20: mol_type = other DNA
aggccaggcataaaaggatt

SEQ ID NO: 41788 - DNA, 20 bp, synthetic construct
  source 1..20: mol_type = other DNA
aaggccaggcataaaaggat

SEQ ID NO: 41789 - DNA, 20 bp, synthetic construct
  source 1..20: mol_type = other DNA
aaaggccaggcataaaagga

SEQ ID NO: 41790 - DNA, 20 bp, synthetic construct
  source 1..20: mol_type = other DNA
gaaaggccaggcataaaagg

SEQ ID NO: 41791 - DNA, 20 bp, synthetic construct
  source 1..20: mol_type = other DNA
ggaaaggccaggcataaaag

SEQ ID NO: 41792 - DNA, 20 bp, synthetic construct
  source 1..20: mol_type = other DNA
tggaaaggccaggcataaaa

SEQ ID NO: 41793 - DNA, 20 bp, synthetic construct
  source 1..20: mol_type = other DNA
atggaaaggccaggcataaa

SEQ ID NO: 41794 - DNA, 20 bp, synthetic construct
  source 1..20: mol_type = other DNA
gatggaaaggccaggcataa

SEQ ID NO: 41795 - DNA, 20 bp, synthetic construct
  source 1..20: mol_type = other DNA
ggatggaaaggccaggcata

SEQ ID NO: 41796 - DNA, 20 bp, synthetic construct
  source 1..20: mol_type = other DNA
aggatggaaaggccaggcat

SEQ ID NO: 41797 - DNA, 20 bp, synthetic construct
  source 1..20: mol_type = other DNA
aaggatggaaaggccaggca

SEQ ID NO: 41798 - DNA, 20 bp, synthetic construct
  source 1..20: mol_type = other DNA
gaaggatggaaaggccaggc

SEQ ID NO: 41799 - DNA, 20 bp, synthetic construct
  source 1..20: mol_type = other DNA
tgaaggatggaaaggccagg

SEQ ID NO: 41800 - DNA, 20 bp, synthetic construct
  source 1..20: mol_type = other DNA
ttgaaggatggaaaggccag

SEQ ID NO: 41801 - DNA, 20 bp, synthetic construct
  source 1..20: mol_type = other DNA
gttgaaggatggaaaggcca

SEQ ID NO: 41802 - DNA, 20 bp, synthetic construct
  source 1..20: mol_type = other DNA
agttgaaggatggaaaggcc

SEQ ID NO: 41803 - DNA, 20 bp, synthetic construct
  source 1..20: mol_type = other DNA
aagttgaaggatggaaaggc

SEQ ID NO: 41804 - DNA, 20 bp, synthetic construct
  source 1..20: mol_type = other DNA
gggaagttgaaggatggaaa

SEQ ID NO: 41805 - DNA, 20 bp, synthetic construct
  source 1..20: mol_type = other DNA
ggggaagttgaaggatggaa

SEQ ID NO: 41806 - DNA, 20 bp, synthetic construct
  source 1..20: mol_type = other DNA
aggggaagttgaaggatgga

SEQ ID NO: 41807 - DNA, 20 bp, synthetic construct
  source 1..20: mol_type = other DNA
aaggggaagttgaaggatgg

SEQ ID NO: 41808 - DNA, 20 bp, synthetic construct
  source 1..20: mol_type = other DNA
gaaaggggaagttgaaggat

SEQ ID NO: 41809 - DNA, 20 bp, synthetic construct
  source 1..20: mol_type = other DNA
ggaaaggggaagttgaagga

SEQ ID NO: 41810 - DNA, 20 bp, synthetic construct
  source 1..20: mol_type = other DNA
gggaaaggggaagttgaagg

SEQ ID NO: 41811 - DNA, 20 bp, synthetic construct
  source 1..20: mol_type = other DNA
tgggaaaggggaagttgaag

SEQ ID NO: 41812 - DNA, 20 bp, synthetic construct
  source 1..20: mol_type = other DNA
atgggaaaggggaagttgaa

SEQ ID NO: 41813 - DNA, 20 bp, synthetic construct
  source 1..20: mol_type = other DNA
catgggaaaggggaagttga

SEQ ID NO: 41814 - DNA, 20 bp, synthetic construct
  source 1..20: mol_type = other DNA
gcatgggaaaggggaagttg

SEQ ID NO: 41815 - DNA, 20 bp, synthetic construct
  source 1..20: mol_type = other DNA
agcatgggaaaggggaagtt

SEQ ID NO: 41816 - DNA, 20 bp, synthetic construct
  source 1..20: mol_type = other DNA
cagcatgggaaaggggaagt

SEQ ID NO: 41817 - DNA, 20 bp, synthetic construct
  source 1..20: mol_type = other DNA
acagcatgggaaaggggaag

SEQ ID NO: 41818 - DNA, 20 bp, synthetic construct
  source 1..20: mol_type = other DNA
cacagcatgggaaaggggaa

SEQ ID NO: 41819 - DNA, 20 bp, synthetic construct
  source 1..20: mol_type = other DNA
tcacagcatgggaaagggga

SEQ ID NO: 41820 - DNA, 20 bp, synthetic construct
  source 1..20: mol_type = other DNA
ttcacagcatgggaaagggg

SEQ ID NO: 41821 - DNA, 20 bp, synthetic construct
  source 1..20: mol_type = other DNA
attcacagcatgggaaaggg

SEQ ID NO: 41822 - DNA, 20 bp, synthetic construct
  source 1..20: mol_type = other DNA
cattcacagcatgggaaagg

SEQ ID NO: 41823 - DNA, 20 bp, synthetic construct
  source 1..20: mol_type = other DNA
tcattcacagcatgggaaag

SEQ ID NO: 41824 - DNA, 20 bp, synthetic construct
  source 1..20: mol_type = other DNA
atcattcacagcatgggaaa

SEQ ID NO: 41825 - DNA, 20 bp, synthetic construct
  source 1..20: mol_type = other DNA
aatcattcacagcatgggaa

SEQ ID NO: 41826 - DNA, 20 bp, synthetic construct
  source 1..20: mol_type = other DNA
caatcattcacagcatggga

SEQ ID NO: 41827 - DNA, 20 bp, synthetic construct
  source 1..20: mol_type = other DNA
acaatcattcacagcatggg

SEQ ID NO: 41828 - DNA, 20 bp, synthetic construct
  source 1..20: mol_type = other DNA
tacaatcattcacagcatgg

SEQ ID NO: 41829 - DNA, 20 bp, synthetic construct
  source 1..20: mol_type = other DNA
atacaatcattcacagcatg

SEQ ID NO: 41830 - DNA, 20 bp, synthetic construct
  source 1..20: mol_type = other DNA
caatacaatcattcacagca

SEQ ID NO: 41831 - DNA, 20 bp, synthetic construct
  source 1..20: mol_type = other DNA
ccaatacaatcattcacagc

SEQ ID NO: 41832 - DNA, 20 bp, synthetic construct
  source 1..20: mol_type = other DNA
tccaatacaatcattcacag

SEQ ID NO: 41833 - DNA, 20 bp, synthetic construct
  source 1..20: mol_type = other DNA
gtccaatacaatcattcaca

SEQ ID NO: 41834 - DNA, 20 bp, synthetic construct
  source 1..20: mol_type = other DNA
tgtccaatacaatcattcac

SEQ ID NO: 41835 - DNA, 20 bp, synthetic construct
  source 1..20: mol_type = other DNA
atgtccaatacaatcattca

SEQ ID NO: 41836 - DNA, 20 bp, synthetic construct
  source 1..20: mol_type = other DNA
cctgtcactgagattaaaac

SEQ ID NO: 41837 - DNA, 20 bp, synthetic construct
  source 1..20: mol_type = other DNA
ccctgtcactgagattaaaa

SEQ ID NO: 41838 - DNA, 20 bp, synthetic construct
  source 1..20: mol_type = other DNA
cccctgtcactgagattaaa

SEQ ID NO: 41839 - DNA, 20 bp, synthetic construct
  source 1..20: mol_type = other DNA
tcccctgtcactgagattaa

SEQ ID NO: 41840 - DNA, 20 bp, synthetic construct
  source 1..20: mol_type = other DNA
ttcccctgtcactgagatta

SEQ ID NO: 41841 - DNA, 20 bp, synthetic construct
  source 1..20: mol_type = other DNA
gttcccctgtcactgagatt

SEQ ID NO: 41842 - DNA, 20 bp, synthetic construct
  source 1..20: mol_type = other DNA
tgttcccctgtcactgagat

SEQ ID NO: 41843 - DNA, 20 bp, synthetic construct
  source 1..20: mol_type = other DNA
ttagagctacctgtgttccc

SEQ ID NO: 41844 - DNA, 20 bp, synthetic construct
  source 1..20: mol_type = other DNA
attagagctacctgtgttcc

SEQ ID NO: 41845 - DNA, 20 bp, synthetic construct
  source 1..20: mol_type = other DNA
tattagagctacctgtgttc

SEQ ID NO: 41846 - DNA, 20 bp, synthetic construct
  source 1..20: mol_type = other DNA
atattagagctacctgtgtt

SEQ ID NO: 41847 - DNA, 20 bp, synthetic construct
  source 1..20: mol_type = other DNA
tatattagagctacctgtgt

SEQ ID NO: 41848 - DNA, 20 bp, synthetic construct
  source 1..20: mol_type = other DNA
ctatattagagctacctgtg

SEQ ID NO: 41849 - DNA, 20 bp, synthetic construct
  source 1..20: mol_type = other DNA
gctatattagagctacctgt

SEQ ID NO: 41850 - DNA, 20 bp, synthetic construct
  source 1..20: mol_type = other DNA
agctatattagagctacctg

SEQ ID NO: 41851 - DNA, 20 bp, synthetic construct
  source 1..20: mol_type = other DNA
cagctatattagagctacct

SEQ ID NO: 41852 - DNA, 20 bp, synthetic construct
  source 1..20: mol_type = other DNA
acagctatattagagctacc

SEQ ID NO: 41853 - DNA, 20 bp, synthetic construct
  source 1..20: mol_type = other DNA
cacagctatattagagctac

SEQ ID NO: 41854 - DNA, 20 bp, synthetic construct
  source 1..20: mol_type = other DNA
tcacagctatattagagcta

SEQ ID NO: 41855 - DNA, 20 bp, synthetic construct
  source 1..20: mol_type = other DNA
gtcacagctatattagagct

SEQ ID NO: 41856 - DNA, 20 bp, synthetic construct
  source 1..20: mol_type = other DNA
agtcacagctatattagagc

SEQ ID NO: 41857 - DNA, 20 bp, synthetic construct
  source 1..20: mol_type = other DNA
cagtcacagctatattagag

SEQ ID NO: 41858 - DNA, 20 bp, synthetic construct
  source 1..20: mol_type = other DNA
tcagtcacagctatattaga

SEQ ID NO: 41859 - DNA, 20 bp, synthetic construct
  source 1..20: mol_type = other DNA
ctcagtcacagctatattag

SEQ ID NO: 41860 - DNA, 20 bp, synthetic construct
  source 1..20: mol_type = other DNA
tctcagtcacagctatatta

SEQ ID NO: 41861 - DNA, 20 bp, synthetic construct
  source 1..20: mol_type = other DNA
atctcagtcacagctatatt

SEQ ID NO: 41862 - DNA, 20 bp, synthetic construct
  source 1..20: mol_type = other DNA
catctcagtcacagctatat

SEQ ID NO: 41863 - DNA, 20 bp, synthetic construct
  source 1..20: mol_type = other DNA
cctagaatgcagtggaaaga

SEQ ID NO: 41864 - DNA, 20 bp, synthetic construct
  source 1..20: mol_type = other DNA
tcctagaatgcagtggaaag

SEQ ID NO: 41865 - DNA, 20 bp, synthetic construct
  source 1..20: mol_type = other DNA
ttcctagaatgcagtggaaa

SEQ ID NO: 41866 - DNA, 20 bp, synthetic construct
  source 1..20: mol_type = other DNA
gttcctagaatgcagtggaa

SEQ ID NO: 41867 - DNA, 20 bp, synthetic construct
  source 1..20: mol_type = other DNA
tgttcctagaatgcagtgga

SEQ ID NO: 41868 - DNA, 20 bp, synthetic construct
  source 1..20: mol_type = other DNA
ctgttcctagaatgcagtgg

SEQ ID NO: 41869 - DNA, 20 bp, synthetic construct
  source 1..20: mol_type = other DNA
actgttcctagaatgcagtg

SEQ ID NO: 41870 - DNA, 20 bp, synthetic construct
  source 1..20: mol_type = other DNA
tactgttcctagaatgcagt

SEQ ID NO: 41871 - DNA, 20 bp, synthetic construct
  source 1..20: mol_type = other DNA
ttactgttcctagaatgcag

SEQ ID NO: 41872 - DNA, 20 bp, synthetic construct
  source 1..20: mol_type = other DNA
cttactgttcctagaatgca

SEQ ID NO: 41873 - DNA, 20 bp, synthetic construct
  source 1..20: mol_type = other DNA
tcttactgttcctagaatgc

SEQ ID NO: 41874 - DNA, 20 bp, synthetic construct
  source 1..20: mol_type = other DNA
ctcttactgttcctagaatg

SEQ ID NO: 41875 - DNA, 20 bp, synthetic construct
  source 1..20: mol_type = other DNA
cctcttactgttcctagaat

SEQ ID NO: 41876 - DNA, 20 bp, synthetic construct
  source 1..20: mol_type = other DNA
tcctcttactgttcctagaa

SEQ ID NO: 41877 - DNA, 20 bp, synthetic construct
  source 1..20: mol_type = other DNA
gtcctcttactgttcctaga

SEQ ID NO: 41878 - DNA, 20 bp, synthetic construct
  source 1..20: mol_type = other DNA
ggtcctcttactgttcctag

SEQ ID NO: 41879 - DNA, 20 bp, synthetic construct
  source 1..20: mol_type = other DNA
aggtcctcttactgttccta

SEQ ID NO: 41880 - DNA, 20 bp, synthetic construct
  source 1..20: mol_type = other DNA
aaggtcctcttactgttcct

SEQ ID NO: 41881 - DNA, 20 bp, synthetic construct
  source 1..20: mol_type = other DNA
caaggtcctcttactgttcc

SEQ ID NO: 41882 - DNA, 20 bp, synthetic construct
  source 1..20: mol_type = other DNA
acaaggtcctcttactgttc

SEQ ID NO: 41883 - DNA, 20 bp, synthetic construct
  source 1..20: mol_type = other DNA
cacaaggtcctcttactgtt

SEQ ID NO: 41884 - DNA, 20 bp, synthetic construct
  source 1..20: mol_type = other DNA
tcacaaggtcctcttactgt

SEQ ID NO: 41885 - DNA, 20 bp, synthetic construct
  source 1..20: mol_type = other DNA
ctcacaaggtcctcttactg

SEQ ID NO: 41886 - DNA, 20 bp, synthetic construct
  source 1..20: mol_type = other DNA
actcacaaggtcctcttact

SEQ ID NO: 41887 - DNA, 20 bp, synthetic construct
  source 1..20: mol_type = other DNA
cactcacaaggtcctcttac

SEQ ID NO: 41888 - DNA, 20 bp, synthetic construct
  source 1..20: mol_type = other DNA
tcactcacaaggtcctctta

SEQ ID NO: 41889 - DNA, 20 bp, synthetic construct
  source 1..20: mol_type = other DNA
ttcactcacaaggtcctctt

SEQ ID NO: 41890 - DNA, 20 bp, synthetic construct
  source 1..20: mol_type = other DNA
attcactcacaaggtcctct

SEQ ID NO: 41891 - DNA, 20 bp, synthetic construct
  source 1..20: mol_type = other DNA
tattcactcacaaggtcctc

SEQ ID NO: 41892 - DNA, 20 bp, synthetic construct
  source 1..20: mol_type = other DNA
ttattcactcacaaggtcct

SEQ ID NO: 41893 - DNA, 20 bp, synthetic construct
  source 1..20: mol_type = other DNA
attattcactcacaaggtcc

SEQ ID NO: 41894 - DNA, 20 bp, synthetic construct
  source 1..20: mol_type = other DNA
aattattcactcacaaggtc

SEQ ID NO: 41895 - DNA, 20 bp, synthetic construct
  source 1..20: mol_type = other DNA
cactctgtaatgtggaaaca

SEQ ID NO: 41896 - DNA, 20 bp, synthetic construct
  source 1..20: mol_type = other DNA
ccactctgtaatgtggaaac

SEQ ID NO: 41897 - DNA, 20 bp, synthetic construct
  source 1..20: mol_type = other DNA
cccactctgtaatgtggaaa

SEQ ID NO: 41898 - DNA, 20 bp, synthetic construct
  source 1..20: mol_type = other DNA
acccactctgtaatgtggaa

SEQ ID NO: 41899 - DNA, 20 bp, synthetic construct
  source 1..20: mol_type = other DNA
tacccactctgtaatgtgga

SEQ ID NO: 41900 - DNA, 20 bp, synthetic construct
  source 1..20: mol_type = other DNA
ttacccactctgtaatgtgg

SEQ ID NO: 41901 - DNA, 20 bp, synthetic construct
  source 1..20: mol_type = other DNA
attacccactctgtaatgtg

SEQ ID NO: 41902 - DNA, 20 bp, synthetic construct
  source 1..20: mol_type = other DNA
tattacccactctgtaatgt

SEQ ID NO: 41903 - DNA, 20 bp, synthetic construct
  source 1..20: mol_type = other DNA
ttattacccactctgtaatg

SEQ ID NO: 41904 - DNA, 20 bp, synthetic construct
  source 1..20: mol_type = other DNA
cttattacccactctgtaat

SEQ ID NO: 41905 - DNA, 20 bp, synthetic construct
  source 1..20: mol_type = other DNA
gcttattacccactctgtaa

SEQ ID NO: 41906 - DNA, 20 bp, synthetic construct
  source 1..20: mol_type = other DNA
tgcttattacccactctgta

SEQ ID NO: 41907 - DNA, 20 bp, synthetic construct
  source 1..20: mol_type = other DNA
ctgcttattacccactctgt

SEQ ID NO: 41908 - DNA, 20 bp, synthetic construct
  source 1..20: mol_type = other DNA
tctgcttattacccactctg

SEQ ID NO: 41909 - DNA, 20 bp, synthetic construct
  source 1..20: mol_type = other DNA
atctgcttattacccactct

SEQ ID NO: 41910 - DNA, 20 bp, synthetic construct
  source 1..20: mol_type = other DNA
aatctgcttattacccactc

SEQ ID NO: 41911 - DNA, 20 bp, synthetic construct
  source 1..20: mol_type = other DNA
taatctgcttattacccact

SEQ ID NO: 41912 - DNA, 20 bp, synthetic construct
  source 1..20: mol_type = other DNA
ctaatctgcttattacccac

SEQ ID NO: 41913 - DNA, 20 bp, synthetic construct
  source 1..20: mol_type = other DNA
actaatctgcttattaccca

SEQ ID NO: 41914 - DNA, 20 bp, synthetic construct
  source 1..20: mol_type = other DNA
tactaatctgcttattaccc

SEQ ID NO: 41915 - DNA, 20 bp, synthetic construct
  source 1..20: mol_type = other DNA
ttactaatctgcttattacc

SEQ ID NO: 41916 - DNA, 20 bp, synthetic construct
  source 1..20: mol_type = other DNA
gtttttactaatctgcttat

SEQ ID NO: 41917 - DNA, 20 bp, synthetic construct
  source 1..20: mol_type = other DNA
tgtttttactaatctgctta

SEQ ID NO: 41918 - DNA, 20 bp, synthetic construct
  source 1..20: mol_type = other DNA
ttgtttttactaatctgctt

SEQ ID NO: 41919 - DNA, 20 bp, synthetic construct
  source 1..20: mol_type = other DNA
attgtttttactaatctgct

SEQ ID NO: 41920 - DNA, 20 bp, synthetic construct
  source 1..20: mol_type = other DNA
gtgaagcagaattgttttta

SEQ ID NO: 41921 - DNA, 20 bp, synthetic construct
  source 1..20: mol_type = other DNA
agtgaagcagaattgttttt

SEQ ID NO: 41922 - DNA, 20 bp, synthetic construct
  source 1..20: mol_type = other DNA
gaagtgaagcagaattgttt

SEQ ID NO: 41923 - DNA, 16 bp, synthetic construct
  source 1..16: mol_type = other DNA
gccatcgcgggtagcc

SEQ ID NO: 41924 - DNA, 16 bp, synthetic construct
  source 1..16: mol_type = other DNA
tccaaacgagtctccg

SEQ ID NO: 41925 - DNA, 16 bp, synthetic construct
  source 1..16: mol_type = other DNA
gattctgaaaccagat

SEQ ID NO: 41926 - DNA, 16 bp, synthetic construct
  source 1..16: mol_type = other DNA
gcgggcgccctgccac

SEQ ID NO: 41927 - DNA, 16 bp, synthetic construct
  source 1..16: mol_type = other DNA
tcatccagcagcaggc

SEQ ID NO: 41928 - DNA, 16 bp, synthetic construct
  source 1..16: mol_type = other DNA
tctataggatccacag

SEQ ID NO: 41929 - DNA, 18 bp, synthetic construct
  source 1..18: mol_type = other DNA
cggctctgggatccccgg

SEQ ID NO: 41930 - DNA, 16 bp, synthetic construct
  source 1..16: mol_type = other DNA
gcagttctccgcggag

SEQ ID NO: 41931 - DNA, 17 bp, synthetic construct
  source 1..17: mol_type = other DNA
ggggcggagacacgccc

SEQ ID NO: 41932 - DNA, 18 bp, synthetic construct
  source 1..18: mol_type = other DNA
gcaggaatcccaggccgg

SEQ ID NO: 41933 - DNA, 16 bp, synthetic construct
  source 1..16: mol_type = other DNA
ctccgcggagtggagt

SEQ ID NO: 41934 - DNA, 18 bp, synthetic construct
  source 1..18: mol_type = other DNA
ggagtctctcaccgggcc

SEQ ID NO: 41935 - DNA, 18 bp, synthetic construct
  source 1..18: mol_type = other DNA
agaggccagcgagctccc

SEQ ID NO: 41936 - DNA, 18 bp, synthetic construct
  source 1..18: mol_type = other DNA
ggctctgggatccccggg

SEQ ID NO: 41937 - DNA, 18 bp, synthetic construct
  source 1..18: mol_type = other DNA
gagctcccttgcacgtca

SEQ ID NO: 41938 - DNA, 17 bp, synthetic construct
  source 1..17: mol_type = other DNA
ccgtccaaccccgcgtc

SEQ ID NO: 41939 - DNA, 18 bp, synthetic construct
  source 1..18: mol_type = other DNA
gcgaggcggcctcttccg

SEQ ID NO: 41940 - DNA, 18 bp, synthetic construct
  source 1..18: mol_type = other DNA
gcctccagctcccccggg

SEQ ID NO: 41941 - DNA, 17 bp, synthetic construct
  source 1..17: mol_type = other DNA
ggtgtcgggagggccat

SEQ ID NO: 41942 - DNA, 18 bp, synthetic construct
  source 1..18: mol_type = other DNA
ctgggccagccgttctct

SEQ ID NO: 41943 - DNA, 18 bp, synthetic construct
  source 1..18: mol_type = other DNA
gggccagccgttctctgg

SEQ ID NO: 41944 - DNA, 16 bp, synthetic construct
  source 1..16: mol_type = other DNA
gctccggaatgccgat

SEQ ID NO: 41945 - DNA, 18 bp, synthetic construct
  source 1..18: mol_type = other DNA
ctgatcaccgaagttctg

SEQ ID NO: 41946 - DNA, 18 bp, synthetic construct
  source 1..18: mol_type = other DNA
gtagccagccaggtgttc

SEQ ID NO: 41947 - DNA, 18 bp, synthetic construct
  source 1..18: mol_type = other DNA
gcccctccgtagccagcc

SEQ ID NO: 41948 - DNA, 18 bp, synthetic construct
  source 1..18: mol_type = other DNA
tcctccagcagagcccgg

SEQ ID NO: 41949 - DNA, 18 bp, synthetic construct
  source 1..18: mol_type = other DNA
cctgggccggctctggga

SEQ ID NO: 41950 - DNA, 18 bp, synthetic construct
  source 1..18: mol_type = other DNA
tgctggtacctgggccgg

SEQ ID NO: 41951 - DNA, 25 bp, synthetic construct
  source 1..25: mol_type = other DNA
gggcattttaatatatctctgaact

SEQ ID NO: 41952 - DNA, 22 bp, synthetic construct
  source 1..22: mol_type = other DNA
tatcttctgaactaatcatcca

SEQ ID NO: 41953 - DNA, 23 bp, synthetic construct
  source 1..23: mol_type = other DNA
caggagatgtaactctaatccag

SEQ ID NO: 41954 - DNA, 25 bp, synthetic construct
  source 1..25: mol_type = other DNA
ctctcaccgggcctagacctagaag

SEQ ID NO: 41955 - DNA, 25 bp, synthetic construct
  source 1..25: mol_type = other DNA
tgcgcactgcgcgcaggtctagcca

SEQ ID NO: 41956 - DNA, 25 bp, synthetic construct
  source 1..25: mol_type = other DNA
actgcgcgcaggtctagccaggaag

SEQ ID NO: 41957 - DNA, 25 bp, synthetic construct
  source 1..25: mol_type = other DNA
cggggtgcgcactgcgcgcaggtct

SEQ ID NO: 41958 - DNA, 30 bp, synthetic construct
  source 1..30: mol_type = other DNA
tgcgcactgcgcgcaggtctagccaggaag

SEQ ID NO: 41959 - DNA, 30 bp, synthetic construct
  source 1..30: mol_type = other DNA
actgcgcgcaggtctagccaggaagcgggc

SEQ ID NO: 41960 - DNA, 25 bp, synthetic construct
  source 1..25: mol_type = other DNA
acccgaccccgtcccaaccccgcgt

SEQ ID NO: 41961 - DNA, 19 bp, synthetic construct
  source 1..19: mol_type = other DNA
tgggctggtggagaggcag

SEQ ID NO: 41962 - DNA, 19 bp, synthetic construct
  source 1..19: mol_type = other DNA
ttcctctctccatctctgc

SEQ ID NO: 41963 - DNA, 19 bp, synthetic construct
  source 1..19: mol_type = other DNA
ttgtcccggaggaaaccgc

SEQ ID NO: 41964 - DNA, 19 bp, synthetic construct
  source 1..19: mol_type = other DNA
aatcacgcctccgtcgtcc

SEQ ID NO: 41965 - DNA, 25 bp, synthetic construct
  source 1..25: mol_type = other DNA
ttccctgcatgtttccgggtgcccg

SEQ ID NO: 41966 - DNA, 19 bp, synthetic construct
  source 1..19: mol_type = other DNA
cttccctgcatgtttccgg

SEQ ID NO: 41967 - DNA, 19 bp, synthetic construct
  source 1..19: mol_type = other DNA
tgtggctctcgttcatttc

SEQ ID NO: 41968 - DNA, 25 bp, synthetic construct
  source 1..25: mol_type = other DNA
ctccgtgggagtcttgagtgtgcca

SEQ ID NO: 41969 - DNA, 19 bp, synthetic construct
  source 1..19: mol_type = other DNA
tggaactgaacctccgtgg

SEQ ID NO: 41970 - DNA, 19 bp, synthetic construct
  source 1..19: mol_type = other DNA
tggtggtggtggtggtggt

SEQ ID NO: 41971 - DNA, 21 bp, synthetic construct
  source 1..21: mol_type = other DNA
caccccttcatgaatggcgcc

SEQ ID NO: 41972 - DNA, 20 bp, synthetic construct
  source 1..20: mol_type = other DNA
acaggctccaccccttcatg

SEQ ID NO: 41973 - DNA, 20 bp, synthetic construct
  source 1..20: mol_type = other DNA
ttccgctcaaagcaggcctc

SEQ ID NO: 41974 - DNA, 25 bp, synthetic construct
  source 1..25: mol_type = other DNA
aaagcgatccttctcaaaggctcgg

SEQ ID NO: 41975 - DNA, 21 bp, synthetic construct
  source 1..21: mol_type = other DNA
cctgcgcgggcgccctgccgc

SEQ ID NO: 41976 - DNA, 19 bp, synthetic construct
  source 1..19: mol_type = other DNA
tatctctgaactaatcatc

SEQ ID NO: 41977 - DNA, 25 bp, synthetic construct
  source 1..25: mol_type = other DNA
agcgcctggcggcggaacgcagacc

SEQ ID NO: 41978 - DNA, 25 bp, synthetic construct
  source 1..25: mol_type = other DNA
atctctgcccgccttccctcccgcc

SEQ ID NO: 41979 - DNA, 22 bp, synthetic construct
  source 1..22: mol_type = other DNA
aaaccagatctgaatcctggac

SEQ ID NO: 41980 - DNA, 22 bp, synthetic construct
  source 1..22: mol_type = other DNA
tttctaggagaggttgcgcctg

SEQ ID NO: 41981 - DNA, 14 bp, synthetic construct
  source 1..14: mol_type = other DNA
agatcccctctgcc

SEQ ID NO: 41982 - DNA, 22 bp, synthetic construct
  source 1..22: mol_type = other DNA
cctagacagcgtcggaaggtag

SEQ ID NO: 41983 - DNA, 16 bp, synthetic construct
  source 1..16: mol_type = other DNA
caggaatcccaggccg

SEQ ID NO: 41984 - DNA, 20 bp, synthetic construct
  source 1..20: mol_type = other DNA
cggctctgggatccccggga

SEQ ID NO: 41985 - DNA, 16 bp, synthetic construct
  source 1..16: mol_type = other DNA
ggctctgggatccccg

SEQ ID NO: 41986 - DNA, 15 bp, synthetic construct
  source 1..15: mol_type = other DNA
ggctctgggatcccc

SEQ ID NO: 41987 - DNA, 20 bp, synthetic construct
  source 1..20: mol_type = other DNA
gagctcccttgcacgtcagc

SEQ ID NO: 41988 - DNA, 20 bp, synthetic construct
  source 1..20: mol_type = other DNA
cgtagccagccaggtgttcc

SEQ ID NO: 41989 - DNA, 20 bp, synthetic construct
  source 1..20: mol_type = other DNA
atgcccaggaaagaatggca

SEQ ID NO: 41990 - DNA, 18 bp, synthetic construct
  source 1..18: mol_type = other DNA
caaagacagacagaggta

SEQ ID NO: 41991 - DNA, 17 bp, synthetic construct
  source 1..17: mol_type = other DNA
gaaaccagatctgaatc

SEQ ID NO: 41992 - DNA, 17 bp, synthetic construct
  source 1..17: mol_type = other DNA
gggtccaaacgagtctc

SEQ ID NO: 41993 - DNA, 16 bp, synthetic construct
  source 1..16: mol_type = other DNA
gctgcagaaactccgg

SEQ ID NO: 41994 - DNA, 16 bp, synthetic construct
  source 1..16: mol_type = other DNA
ggggtccaaacgagtc

SEQ ID NO: 41995 - DNA, 16 bp, synthetic construct
  source 1..16: mol_type = other DNA
tacaggggatattgtg

SEQ ID NO: 41996 - DNA, 15 bp, synthetic construct
  source 1..15: mol_type = other DNA
agcagggcggtctgg

SEQ ID NO: 41997 - DNA, 15 bp, synthetic construct
  source 1..15: mol_type = other DNA
agctgccccggcttg

SEQ ID NO: 41998 - DNA, 15 bp, synthetic construct
  source 1..15: mol_type = other DNA
cccaggaaagaaagg

SEQ ID NO: 41999 - DNA, 16 bp, synthetic construct
  source 1..16: mol_type = other DNA
ggtgagccccggccgg

SEQ ID NO: 42000 - DNA, 15 bp, synthetic construct
  source 1..15: mol_type = other DNA
gcagaccagggcgcc

SEQ ID NO: 42001 - DNA, 15 bp, synthetic construct
  source 1..15: mol_type = other DNA
cctgggccggctctg

SEQ ID NO: 42002 - DNA, 17 bp, synthetic construct
  source 1..17: mol_type = other DNA
cgggtgcctggcccttc

SEQ ID NO: 42003 - DNA, 16 bp, synthetic construct
  source 1..16: mol_type = other DNA
ccagctcctcccgggc

SEQ ID NO: 42004 - DNA, 20 bp, synthetic construct
  source 1..20: mol_type = other DNA
cgagctcccttgcacgtcag

SEQ ID NO: 42005 - DNA, 16 bp, synthetic construct
  source 1..16: mol_type = other DNA
aagcgatccttctcaa

SEQ ID NO: 42006 - DNA, 16 bp, synthetic construct
  source 1..16: mol_type = other DNA
  modified_base 1: mod_base = OTHER; note = LNA guanine
  modified_base 2: mod_base = OTHER; note = LNA cytosine
  misc_feature 1..16: note = phosphothionate-modified backbone between every residue
  modified_base 15: mod_base = OTHER; note = LNA cytosine
  modified_base 16: mod_base = OTHER; note = LNA cytosine
gccatcgcgggtagcc

SEQ ID NO: 42007 - DNA, 16 bp, synthetic construct
  source 1..16: mol_type = other DNA
  modified_base 1: mod_base = OTHER; note = LNA guanosine
  modified_base 2: mod_base = OTHER; note = LNA cytosine
  modified_base 15: mod_base = OTHER; note = LNA cytosine
  modified_base 16: mod_base = OTHER; note = LNA cytosine
  misc_feature 1: note = 5' amino-carbon 6 chain
  misc_feature 1..16: note = phosphothionate-modifined backbone between every residue
gccatcgcgggtagcc

SEQ ID NO: 42008 - DNA, 16 bp, synthetic construct
  source 1..16: mol_type = other DNA
  misc_feature 1..16: note = phosphothionate-modified backbone between each residue
  modified_base 1: mod_base = OTHER; note = LNA thymine
  modified_base 2: mod_base = OTHER; note = LNA guanine
  modified_base 15: mod_base = OTHER; note = LNA thymine
  modified_base 16: mod_base = OTHER; note = LNA cytosine
tgtcgggagggccatc

SEQ ID NO: 42009 - DNA, 16 bp, synthetic construct
  source 1..16: mol_type = other DNA
  misc_feature 1: note = 5- amino-carbon 6 chain
  misc_feature 3..14: note = phosphothionate-modified backbone between every residue
  modified_base 1: mod_base = OTHER; note = LNA thymine
  modified_base 2: mod_base = OTHER; note = LNA guanine
  modified_base 4: mod_base = OTHER; note = 5'-methyldeoxycytosine
  modified_base 12..13: mod_base = OTHER; note = 5'-methyldeoxycytosine
  modified_base 15: mod_base = OTHER; note = LNA thymine
  modified_base 16: mod_base = OTHER; note = LNA cytosine
tgtcgggagggccatc

SEQ ID NO: 42010 - DNA, 16 bp, synthetic construct
  source 1..16: mol_type = other DNA
  misc_feature 1: note = 5' amino-carbon 6 chain
  modified_base 1: mod_base = OTHER; note = LNA thymine
  modified_base 2: mod_base = OTHER; note = LNA guanine
  modified_base 15: mod_base = OTHER; note = LNA thymine
  modified_base 16: mod_base = OTHER; note = LNA cytosine
  misc_feature 1..2: note = methylphosphonate-modified backbone
  misc_feature 3..14: note = phosphothionate-modified backbone between every residue
  misc_feature 15..16: note = methylphosphonate-modified backbone
tgtcgggagggccatc

SEQ ID NO: 42011 - DNA, 16 bp, synthetic construct
  source 1..16: mol_type = other DNA
  misc_feature 1: note = 5' amino-carbon 6 chain
  modified_base 1: mod_base = OTHER; note = BNA thymine
  modified_base 2: mod_base = OTHER; note = BNA guanine
  modified_base 15: mod_base = OTHER; note = BNA thymine
  modified_base 16: mod_base = OTHER; note = BNA cytosine
  misc_feature 1..16: note = phosphothionate-modified backbone between every residue
tgtcgggagggccatc

SEQ ID NO: 42012 - DNA, 16 bp, synthetic construct
  source 1..16: mol_type = other DNA
  modified_base 1: mod_base = OTHER; note = LNA thymine
  modified_base 2: mod_base = OTHER; note = LNA cytosine
  modified_base 15: mod_base = OTHER; note = LNA cytosine
  modified_base 16: mod_base = OTHER; note = LNA guanine
  misc_feature 1..16: note = phosphothionate-modified backbone between every residue
tccaaacgagtctccg

SEQ ID NO: 42013 - DNA, 16 bp, synthetic construct
  source 1..16: mol_type = other DNA
  misc_feature 1: note = 5' amino-carbon chain
  misc_feature 1..16: note = phosphothionate-modified backbone between every residue
  modified_base 1: mod_base = OTHER; note = LNA thymine
  modified_base 2: mod_base = OTHER; note = LNA cytosine
  modified_base 15: mod_base = OTHER; note = LNA cytosine
  modified_base 16: mod_base = OTHER; note = LNA guanine
tccaaacgagtctccg

SEQ ID NO: 42014 - DNA, 16 bp, synthetic construct
  source 1..16: mol_type = other DNA
  misc_feature 1..16: note = phosphothionate-modified backbone between every residue
  modified_base 1: mod_base = OTHER; note = LNA guanine
  modified_base 2: mod_base = OTHER; note = LNA adenine
  modified_base 15: mod_base = OTHER; note = LNA adenine
  modified_base 16: mod_base = OTHER; note = LNA thymine
gattctgaaaccagat

SEQ ID NO: 42015 - DNA, 16 bp, synthetic construct
  source 1..16: mol_type = other DNA
  misc_feature 1: note = 5' amino-carbon 6 chain
  misc_feature 1..16: note = phosphothionate-modified backbone between every residue
  modified_base 1: mod_base = OTHER; note = LNA guanine
  modified_base 2: mod_base = OTHER; note = LNA adenine
  modified_base 15: mod_base = OTHER; note = LNA adenine
  modified_base 16: mod_base = OTHER; note = LNA thymine
gattctgaaaccagat

SEQ ID NO: 42016 - DNA, 16 bp, synthetic construct
  source 1..16: mol_type = other DNA
  misc_feature 1..16: note = phosphothionate-modified backbone between every residue
  modified_base 1: mod_base = OTHER; note = LNA guanine
  modified_base 2: mod_base = OTHER; note = LNA cytosine
  modified_base 15: mod_base = OTHER; note = LNA adenine
  modified_base 16: mod_base = OTHER; note = LNA cytosine
gcgggcgccctgccac

SEQ ID NO: 42017 - DNA, 16 bp, synthetic construct
  source 1..16: mol_type = other DNA
  misc_feature 1: note = 5' amino-carbon 6 chain
  misc_feature 1..16: note = phosphothionate-modified backbone between every residue
  modified_base 1: mod_base = OTHER; note = LNA guanine
  modified_base 2: mod_base = OTHER; note = LNA cytosine
  modified_base 15: mod_base = OTHER; note = LNA adenine
  modified_base 16: mod_base = OTHER; note = LNA cytosine
gcgggcgccctgccac

SEQ ID NO: 42018 - DNA, 16 bp, synthetic construct
  source 1..16: mol_type = other DNA
  misc_feature 1..16: note = phosphothionate-modified backbone between every residue
  modified_base 1: mod_base = OTHER; note = LNA thymine
  modified_base 2: mod_base = OTHER; note = LNA cytosine
  modified_base 15: mod_base = OTHER; note = LNA guanine
  modified_base 16: mod_base = OTHER; note = LNA cytosine
tcatccagcagcaggc

SEQ ID NO: 42019 - DNA, 16 bp, synthetic construct
  source 1..16: mol_type = other DNA
  misc_feature 1: note = 5' amino-carbon 6 chain
  misc_feature 1..16: note = phosphothionate-modified backbone between every residue
  modified_base 1: mod_base = OTHER; note = LNA thymine
  modified_base 2: mod_base = OTHER; note = LNA cytosine
  modified_base 15: mod_base = OTHER; note = LNA guanine
  modified_base 16: mod_base = OTHER; note = LNA cytosine
tcatccagcagcaggc

SEQ ID NO: 42020 - DNA, 16 bp, synthetic construct
  source 1..16: mol_type = other DNA
  misc_feature 1..16: note = phosphothionate-modified backbone
  modified_base 1: mod_base = OTHER; note = LNA thymine
  modified_base 2: mod_base = OTHER; note = LNA adenine
  modified_base 15..16: mod_base = OTHER; note = LNA thymine
tagccagccaggtgtt

SEQ ID NO: 42021 - DNA, 16 bp, synthetic construct
  source 1..16: mol_type = other DNA
  misc_feature 1: note = 5' amino-carbon 6 chain
  misc_feature 1..16: note = phosphothionate-modified backbone between every residue
  modified_base 1: mod_base = OTHER; note = LNA thymine
  modified_base 2: mod_base = OTHER; note = LNA adenine
  modified_base 15..16: mod_base = OTHER; note = LNA thymine
tagccagccaggtgtt

SEQ ID NO: 42022 - DNA, 16 bp, synthetic construct
  source 1..16: mol_type = other DNA
  misc_feature 1..16: note = phosphothionate-modified backbone between every residue
  modified_base 1: mod_base = OTHER; note = LNA thymine
  modified_base 2: mod_base = OTHER; note = 2'-O-methyladenine
  modified_base 3: mod_base = OTHER; note = LNA guanine
  modified_base 14: mod_base = OTHER; note = LNA guanine
  modified_base 15: mod_base = um
  modified_base 16: mod_base = OTHER; note = LNA thymine
tagccagccaggtgtt

SEQ ID NO: 42023 - DNA, 16 bp, synthetic construct
  source 1..16: mol_type = other DNA
  modified_base 1: mod_base = OTHER; note = LNA cytosine
  misc_feature 1..16: note = phosphothionate-modified backbone between every residue
  modified_base 2: mod_base = OTHER; note = LNA adenine
  modified_base 15..16: mod_base = OTHER; note = LNA guanine
cagcgtcggaaggtgg

SEQ ID NO: 42024 - DNA, 16 bp, synthetic construct
  source 1..16: mol_type = other DNA
  misc_feature 1..16: note = phosphothionate-modified backbone between every residue
  misc_feature 1: note = 5' amino-carbon 6 chain
  modified_base 1: mod_base = OTHER; note = LNA cytosine
  modified_base 2: mod_base = OTHER; note = LNA adenine
  modified_base 15..16: mod_base = OTHER; note = LNA guanine
cagcgtcggaaggtgg

SEQ ID NO: 42025 - DNA, 16 bp, synthetic construct
  source 1..16: mol_type = other DNA
  misc_feature 1..16: note = phosphothionate-modified backbone between every residue
  modified_base 1: mod_base = OTHER; note = LNA thymine
  modified_base 2: mod_base = OTHER; note = LNA adenine
  modified_base 15: mod_base = OTHER; note = LNA adenine
  modified_base 16: mod_base = OTHER; note = LNA guanine
tagacagcgtcggaag

SEQ ID NO: 42026 - DNA, 16 bp, synthetic construct
  source 1..16: mol_type = other DNA
  misc_feature 1..16: note = phosphothionate-modified backbone between every residue
  misc_feature 1: note = 5' amino-carbon 6 chain
  modified_base 1: mod_base = OTHER; note = LNA thymine
  modified_base 2: mod_base = OTHER; note = LNA adenine
  modified_base 15: mod_base = OTHER; note = LNA adenine
  modified_base 16: mod_base = OTHER; note = LNA guanine
tagacagcgtcggaag

SEQ ID NO: 42027 - DNA, 16 bp, synthetic construct
  source 1..16: mol_type = other DNA
  misc_feature 1..16: note = phosphothionate-modified backbone between every residue
  modified_base 1: mod_base = OTHER; note = LNA adenine
  modified_base 2: mod_base = OTHER; note = LNA thymine
  modified_base 15: mod_base = OTHER; note = LNA guanine
  modified_base 16: mod_base = OTHER; note = LNA adenine
ataggatccacaggga

SEQ ID NO: 42028 - DNA, 16 bp, synthetic construct
  source 1..16: mol_type = other DNA
  misc_feature 1..16: note = phosphothionate-modified backbone between every residue
  misc_feature 1: note = 5' amino-carbon 6 chain
  modified_base 1: mod_base = OTHER; note = LNA adenine
  modified_base 2: mod_base = OTHER; note = LNA thymine
  modified_base 15: mod_base = OTHER; note = LNA guanine
  modified_base 16: mod_base = OTHER; note = LNA adenine
ataggatccacaggga

SEQ ID NO: 42029 - DNA, 16 bp, synthetic construct
  source 1..16: mol_type = other DNA
  misc_feature 1..16: note = phosphothionate-modified backbone between every residue
  misc_feature 1: note = 5' amino-carbon 6 chain
  modified_base 1: mod_base = OTHER; note = BNA adenine
  modified_base 2: mod_base = OTHER; note = BNA thymine
  modified_base 15: mod_base = OTHER; note = BNA guanine
  modified_base 16: mod_base = OTHER; note = BNA adenine
ataggatccacaggga

SEQ ID NO: 42030 - DNA, 16 bp, synthetic construct
  source 1..16: mol_type = other DNA
  misc_feature 1..16: note = phosphothionate-modified backbone between every residue
  modified_base 1: mod_base = OTHER; note = LNA thymine
  modified_base 2: mod_base = OTHER; note = LNA cytosine
  modified_base 15: mod_base = OTHER; note = LNA adenine
  modified_base 16: mod_base = OTHER; note = LNA guanine
tctataggatccacag

SEQ ID NO: 42031 - DNA, 16 bp, synthetic construct
  source 1..16: mol_type = other DNA
  misc_feature 1..16: note = phosphothionate-modified backbone between every residue
  misc_feature 1: note = 5' amino-carbon 6 chain
  modified_base 1: mod_base = OTHER; note = LNA thymine
  modified_base 2: mod_base = OTHER; note = LNA cytosine
  modified_base 15: mod_base = OTHER; note = LNA adenine
  modified_base 16: mod_base = OTHER; note = LNA guanine
tctataggatccacag

SEQ ID NO: 42032 - DNA, 16 bp, synthetic construct
  source 1..16: mol_type = other DNA
  misc_feature 1..16: note = phosphothionate-modified backbone between every residue
  modified_base 1: mod_base = OTHER; note = LNA guanine
  modified_base 2: mod_base = OTHER; note = LNA cytosine
  modified_base 15..16: mod_base = OTHER; note = LNA guanine
gcactaatcatccagg

SEQ ID NO: 42033 - DNA, 16 bp, synthetic construct
  source 1..16: mol_type = other DNA
  misc_feature 1..16: note = phosphothionate-modified backbone between every residue
  misc_feature 1: note = 5' amino-carbon 6 chain
  modified_base 1: mod_base = OTHER; note = LNA guanine
  modified_base 2: mod_base = OTHER; note = LNA cytosine
  modified_base 15..16: mod_base = OTHER; note = LNA guanine
gcactaatcatccagg

SEQ ID NO: 42034 - DNA, 15 bp, synthetic construct
  source 1..15: mol_type = other DNA
  misc_feature 1..15: note = phosphothionate-modified backbone between every residue
  modified_base 1: mod_base = OTHER; note = LNA cytosine
  modified_base 2: mod_base = OTHER; note = LNA adenine
  modified_base 3: mod_base = OTHER; note = LNA guanine
  modified_base 13: mod_base = OTHER; note = LNA guanine
  modified_base 14: mod_base = OTHER; note = LNA thymine
  modified_base 15: mod_base = OTHER; note = LNA guanine
cagcgtcggaaggtg

SEQ ID NO: 42035 - DNA, 15 bp, synthetic construct
  source 1..15: mol_type = other DNA
  misc_feature 1..15: note = phosphothionate-modified backbone between every residue
  misc_feature 1: note = 5' amino-carbon 6 chain
  modified_base 1: mod_base = OTHER; note = LNA cytosine
  modified_base 2: mod_base = OTHER; note = LNA adenine
  modified_base 3: mod_base = OTHER; note = LNA guanine
  modified_base 13: mod_base = OTHER; note = LNA guanine
  modified_base 14: mod_base = OTHER; note = LNA thymine
  modified_base 15: mod_base = OTHER; note = LNA guanine
cagcgtcggaaggtg

SEQ ID NO: 42036 - DNA, 20 bp, synthetic construct
  source 1..20: mol_type = other DNA
  misc_feature 1..20: note = phosphothionate-modified backbone between every residue
  modified_base 1..2: mod_base = OTHER; note = 2'-methyloxyethyl cytosine
  modified_base 3: mod_base = OTHER; note = 2'-methyloxyethyl thymine
  modified_base 4: mod_base = OTHER; note = 2'-methyloxyethyl adenine
  modified_base 5: mod_base = OTHER; note = 2'-methyloxyethyl guanine
  modified_base 16..17: mod_base = OTHER; note = 2'-methyloxyethyl adenine
  modified_base 18..19: mod_base = OTHER; note = 2'-methyloxyethyl guanine
  modified_base 20: mod_base = OTHER; note = 2'-methyloxyethyl thymine
cctagacagcgtcggaaggt

SEQ ID NO: 42037 - DNA, 20 bp, synthetic construct
  source 1..20: mol_type = other DNA
  misc_feature 1..20: note = phosphothionate-modified backbone between every residue
  misc_feature 1: note = 5' amino-carbon 6 chain
  modified_base 1..2: mod_base = OTHER; note = 2'-methyloxyethyl cytosine
  modified_base 3: mod_base = OTHER; note = 2'-methyloxyethyl thymine
  modified_base 4: mod_base = OTHER; note = 2'-methyloxyethyl adenine
  modified_base 5: mod_base = OTHER; note = 2'-methyloxyethyl guanine
  modified_base 16..17: mod_base = OTHER; note = 2'-methyloxyethyl adenine
  modified_base 18..19: mod_base = OTHER; note = 2'-methyloxyethyl guanine
  modified_base 20: mod_base = OTHER; note = 2'-methyloxyethyl thymine
cctagacagcgtcggaaggt

SEQ ID NO: 42038 - DNA, 20 bp, synthetic construct
  source 1..20: mol_type = other DNA
  misc_feature 1..20: note = phosphothionate-modified backbone between every residue
  modified_base 1..2: mod_base = OTHER; note = LNA cytosine
  modified_base 4: mod_base = OTHER; note = LNA adenine
  modified_base 15: mod_base = OTHER; note = LNA guanine
  modified_base 16: mod_base = OTHER; note = LNA adenine
  modified_base 19: mod_base = OTHER; note = LNA guanine
  modified_base 20: mod_base = OTHER; note = LNA thymine
cctagacagcgtcggaaggt

SEQ ID NO: 42039 - DNA, 18 bp, synthetic construct
  source 1..18: mol_type = other DNA
  misc_feature 1..18: note = phosphothionate-modified backbone between every residue
  modified_base 1: mod_base = OTHER; note = LNA adenine
  modified_base 2: mod_base = OTHER; note = LNA thymine
  modified_base 3: mod_base = OTHER; note = LNA adenine
  modified_base 16: mod_base = OTHER; note = LNA adenine
  modified_base 17..18: mod_base = OTHER; note = LNA guanine
ataggatccacagggagg

SEQ ID NO: 42040 - DNA, 18 bp, synthetic construct
  source 1..18: mol_type = other DNA
  misc_feature 1..18: note = phosphothionate-modified backbone between every residue
  modified_base 1: mod_base = OTHER; note = LNA adenine
  modified_base 2: mod_base = OTHER; note = LNA thymine
  modified_base 15: mod_base = OTHER; note = LNA guanine
  modified_base 17..18: mod_base = OTHER; note = LNA guanine
ataggatccacagggagg

SEQ ID NO: 42041 - DNA, 18 bp, synthetic construct
  source 1..18: mol_type = other DNA
  misc_feature 1..18: note = phosphothionate-modified backbone between every residue
  modified_base 1: mod_base = OTHER; note = LNA cytosine
  modified_base 2..3: mod_base = OTHER; note = LNA guanine
  modified_base 16: mod_base = OTHER; note = LNA cytosine
  modified_base 17..18: mod_base = OTHER; note = LNA guanine
cggctctgggatccccgg

SEQ ID NO: 42042 - DNA, 17 bp, synthetic construct
  source 1..17: mol_type = other DNA
  misc_feature 1..17: note = phosphothionate-modified backbone between every residue
  modified_base 1..3: mod_base = OTHER; note = LNA guanine
  modified_base 15..17: mod_base = OTHER; note = LNA cytosine
ggggcggagacacgccc

SEQ ID NO: 42043 - DNA, 18 bp, synthetic construct
  source 1..18: mol_type = other DNA
  misc_feature 1..18: note = phosphothionate-modified backbone between every residue
  modified_base 1: mod_base = OTHER; note = LNA adenine
  modified_base 2: mod_base = OTHER; note = LNA guanine
  modified_base 3: mod_base = OTHER; note = LNA adenine
  modified_base 16: mod_base = OTHER; note = LNA cytosine
  modified_base 17: mod_base = OTHER; note = LNA adenine
  modified_base 18: mod_base = OTHER; note = LNA guanine
agaaggcaggaatcccag

SEQ ID NO: 42044 - DNA, 18 bp, synthetic construct
  source 1..18: mol_type = other DNA
  misc_feature 1..18: note = phosphothionate-modified backbone between every residue
  modified_base 1: mod_base = OTHER; note = LNA guanine
  modified_base 2: mod_base = OTHER; note = LNA cytosine
  modified_base 3: mod_base = OTHER; note = LNA adenine
  modified_base 16: mod_base = OTHER; note = LNA cytosine
  modified_base 17..18: mod_base = OTHER; note = LNA guanine
gcaggaatcccaggccgg

SEQ ID NO: 42045 - DNA, 18 bp, synthetic construct
  source 1..18: mol_type = other DNA
  misc_feature 1..18: note = phosphothionate-modified backbone between every residue
  modified_base 1: mod_base = OTHER; note = LNA guanine
  modified_base 2: mod_base = OTHER; note = LNA cytosine
  modified_base 4: mod_base = OTHER; note = LNA guanine
  modified_base 17: mod_base = gm
  modified_base 18: mod_base = OTHER; note = LNA guanine
gcaggaatcccaggccgg

SEQ ID NO: 42046 - DNA, 18 bp, synthetic construct
  source 1..18: mol_type = other DNA
  misc_feature 1..18: note = phosphothionate-modified backbone between every residue
  modified_base 1: mod_base = OTHER; note = LNA guanine
  modified_base 2: mod_base = OTHER; note = LNA cytosine
  modified_base 3: mod_base = OTHER; note = 2'-O-methyladenosine
  modified_base 16: mod_base = OTHER; note = LNA cytosine
  modified_base 17: mod_base = gm
  modified_base 18: mod_base = OTHER; note = LNA guanine
gcaggaatcccaggccgg

SEQ ID NO: 42047 - DNA, 18 bp, synthetic construct
  source 1..18: mol_type = other DNA
  misc_feature 1..18: note = phosphothionate-modified backbone between every residue
  modified_base 1..2: mod_base = OTHER; note = LNA guanine
  modified_base 3: mod_base = OTHER; note = LNA adenine
  modified_base 16: mod_base = OTHER; note = LNA guanine
  modified_base 17..18: mod_base = OTHER; note = LNA cytosine
ggagtctctcaccgggcc

SEQ ID NO: 42048 - DNA, 18 bp, synthetic construct
  source 1..18: mol_type = other DNA
  misc_feature 1..18: note = phosphothionate-modified backbone between every residue
  modified_base 1: mod_base = OTHER; note = LNA adenine
  modified_base 2: mod_base = OTHER; note = LNA guanine
  modified_base 3: mod_base = OTHER; note = LNA adenine
  modified_base 16..18: mod_base = OTHER; note = LNA cytosine
agaggccagcgagctccc

SEQ ID NO: 42049 - DNA, 18 bp, synthetic construct
  source 1..18: mol_type = other DNA
  misc_feature 1..18: note = phosphothionate-modified backbone between every residue
  modified_base 1..2: mod_base = OTHER; note = LNA guanine
  modified_base 3: mod_base = OTHER; note = LNA cytosine
  modified_base 16..18: mod_base = OTHER; note = LNA guanine
ggctctgggatccccggg

SEQ ID NO: 42050 - DNA, 18 bp, synthetic construct
  source 1..18: mol_type = other DNA
  misc_feature 1..18: note = phosphothionate-modified backbone between every residue
  modified_base 1: mod_base = OTHER; note = LNA guanine
  modified_base 2: mod_base = gm
  modified_base 4: mod_base = OTHER; note = LNA thymine
  modified_base 17..18: mod_base = OTHER; note = LNA guanine
ggctctgggatccccggg

SEQ ID NO: 42051 - DNA, 18 bp, synthetic construct
  source 1..18: mol_type = other DNA
  misc_feature 1..18: note = phosphothionate-modified backbone between every residue
  modified_base 1: mod_base = OTHER; note = LNA guanine
  modified_base 2: mod_base = gm
  modified_base 3: mod_base = OTHER; note = LNA cytosine
  modified_base 16: mod_base = gm
  modified_base 17: mod_base = gm
  modified_base 18: mod_base = OTHER; note = LNA guanine
ggctctgggatccccggg

SEQ ID NO: 42052 - DNA, 18 bp, synthetic construct
  source 1..18: mol_type = other DNA
  misc_feature 1..18: note = phosphothionate-modified backbone between every residue
  modified_base 1..2: mod_base = OTHER; note = LNA guanine
  modified_base 3: mod_base = OTHER; note = LNA cytosine
  modified_base 16..18: mod_base = OTHER; note = LNA guanine
ggctctgggatccccggg

SEQ ID NO: 42053 - DNA, 18 bp, synthetic construct
  source 1..18: mol_type = other DNA
  misc_feature 1..18: note = phosphothionate-modified backbone between every residue
  modified_base 1: mod_base = OTHER; note = LNA cytosine
  modified_base 2: mod_base = OTHER; note = LNA adenine
  modified_base 3: mod_base = OTHER; note = LNA guanine
  modified_base 16: mod_base = OTHER; note = LNA guanine
  modified_base 17: mod_base = OTHER; note = LNA cytosine
  modified_base 18: mod_base = OTHER; note = LNA thymine
cagagaggccagcgagct

SEQ ID NO: 42054 - DNA, 18 bp, synthetic construct
  source 1..18: mol_type = other DNA
  misc_feature 1..18: note = phosphothionate-modified backbone between every residue
  modified_base 1: mod_base = OTHER; note = LNA guanine
  modified_base 2: mod_base = OTHER; note = LNA adenine
  modified_base 3: mod_base = OTHER; note = LNA cytosine
  modified_base 16: mod_base = OTHER; note = LNA thymine
  modified_base 17..18: mod_base = OTHER; note = LNA guanine
gacagcgtcggaaggtgg

SEQ ID NO: 42055 - DNA, 18 bp, synthetic construct
  source 1..18: mol_type = other DNA
  misc_feature 1..18: note = phosphothionate-modified backbone between every residue
  misc_feature 1: note = 5' amino-carbon 6 chain
  modified_base 1: mod_base = OTHER; note = LNA guanine
  modified_base 2: mod_base = OTHER; note = LNA adenine
  modified_base 3: mod_base = OTHER; note = LNA cytosine
  modified_base 6: mod_base = OTHER; note = 5'-methyldeoxycytosine
  modified_base 9: mod_base = OTHER; note = 5'-methyldeoxycytosine
  modified_base 16: mod_base = OTHER; note = LNA thymine
  modified_base 17..18: mod_base = OTHER; note = LNA guanine
gacagcgtcggaaggtgg

SEQ ID NO: 42056 - DNA, 18 bp, synthetic construct
  source 1..18: mol_type = other DNA
  misc_feature 1..18: note = phosphothionate-modified backbone between every residue
  modified_base 1: mod_base = OTHER; note = LNA guanine
  modified_base 2: mod_base = OTHER; note = LNA thymine
  modified_base 3: mod_base = OTHER; note = LNA adenine
  modified_base 16: mod_base = OTHER; note = LNA guanine
  modified_base 17..18: mod_base = OTHER; note = LNA thymine
gtaactctaatccaggtt

SEQ ID NO: 42057 - DNA, 16 bp, synthetic construct
  source 1..16: mol_type = other DNA
  misc_feature 1..16: note = phosphothionate-modified backbone between every residue
  modified_base 1: mod_base = OTHER; note = LNA guanine
  modified_base 2: mod_base = OTHER; note = 2'-O-methyladenine
  modified_base 3: mod_base = OTHER; note = LNA cytosine
  modified_base 14: mod_base = OTHER; note = LNA adenine
  modified_base 15: mod_base = OTHER; note = 2'-O-methyladenine
  modified_base 16: mod_base = OTHER; note = LNA thymine
gacattcagccagaat

SEQ ID NO: 42058 - DNA, 18 bp, synthetic construct
  source 1..18: mol_type = other DNA
  misc_feature 1..18: note = phosphothionate-modified backbone between every residue
  modified_base 1: mod_base = OTHER; note = LNA adenine
  modified_base 2: mod_base = OTHER; note = LNA cytosine
  modified_base 3: mod_base = OTHER; note = LNA adenine
  modified_base 16..17: mod_base = OTHER; note = LNA guanine
  modified_base 18: mod_base = OTHER; note = LNA cytosine
acaagggcacagagaggc

SEQ ID NO: 42059 - DNA, 18 bp, synthetic construct
  source 1..18: mol_type = other DNA
  misc_feature 1..18: note = phosphothionate-modified backbone between every residue
  modified_base 1: mod_base = OTHER; note = LNA guanine
  modified_base 2: mod_base = OTHER; note = LNA adenine
  modified_base 3: mod_base = OTHER; note = LNA guanine
  modified_base 16: mod_base = OTHER; note = LNA thymine
  modified_base 17: mod_base = OTHER; note = LNA cytosine
  modified_base 18: mod_base = OTHER; note = LNA adenine
gagctcccttgcacgtca

SEQ ID NO: 42060 - DNA, 18 bp, synthetic construct
  source 1..18: mol_type = other DNA
  misc_feature 1..18: note = phosphothionate-modified backbone between every residue
  misc_feature 1: note = 5' amino-carbon 6 chain
  modified_base 1: mod_base = OTHER; note = LNA guanine
  modified_base 2: mod_base = OTHER; note = LNA adenine
  modified_base 3: mod_base = OTHER; note = LNA guanine
  modified_base 14: mod_base = OTHER; note = 5'-methyldeoxycytosine
  modified_base 16: mod_base = OTHER; note = LNA thymine
  modified_base 17: mod_base = OTHER; note = LNA cytosine
  modified_base 18: mod_base = OTHER; note = LNA adenine
gagctcccttgcacgtca

SEQ ID NO: 42061 - DNA, 18 bp, synthetic construct
  source 1..18: mol_type = other DNA
  misc_feature 1..18: note = phosphothionate-modified backbone between every residue
  modified_base 1: mod_base = OTHER; note = LNA guanine
  modified_base 2: mod_base = OTHER; note = 2'-O-methyladenine
  modified_base 3: mod_base = OTHER; note = LNA guanine
  modified_base 16: mod_base = OTHER; note = LNA thymine
  modified_base 17: mod_base = cm
  modified_base 18: mod_base = OTHER; note = LNA adenine
gagctcccttgcacgtca

SEQ ID NO: 42062 - DNA, 18 bp, synthetic construct
  source 1..18: mol_type = other DNA
  misc_feature 1..18: note = phosphothionate-modified backbone between every residue
  modified_base 1: mod_base = OTHER; note = LNA guanine
  modified_base 2: mod_base = OTHER; note = LNA adenine
  modified_base 4: mod_base = OTHER; note = LNA cytosine
  modified_base 5: mod_base = OTHER; note = LNA thymine
  modified_base 17: mod_base = cm
  modified_base 18: mod_base = OTHER; note = LNA adenine
gagctcccttgcacgtca

SEQ ID NO: 42063 - DNA, 17 bp, synthetic construct
  source 1..17: mol_type = other DNA
  misc_feature 1..17: note = phosphothionate-modified backbone between every residue
  modified_base 1..2: mod_base = OTHER; note = LNA cytosine
  modified_base 3: mod_base = OTHER; note = LNA guanine
  modified_base 15: mod_base = OTHER; note = LNA guanine
  modified_base 16: mod_base = OTHER; note = LNA thymine
  modified_base 17: mod_base = OTHER; note = LNA cytosine
ccgtccaaccccgcgtc

SEQ ID NO: 42064 - DNA, 18 bp, synthetic construct
  source 1..18: mol_type = other DNA
  misc_feature 1..18: note = phosphothionate-modified backbone between every residue
  modified_base 1..2: mod_base = OTHER; note = LNA cytosine
  modified_base 3: mod_base = OTHER; note = LNA thymine
  modified_base 16: mod_base = OTHER; note = LNA guanine
  modified_base 17: mod_base = OTHER; note = LNA cytosine
  modified_base 18: mod_base = OTHER; note = LNA adenine
cctaaagctcctccagca

SEQ ID NO: 42065 - DNA, 18 bp, synthetic construct
  source 1..18: mol_type = other DNA
  misc_feature 1..18: note = phosphothionate-modified backbone between every residue
  modified_base 1: mod_base = OTHER; note = LNA guanine
  modified_base 2: mod_base = OTHER; note = LNA cytosine
  modified_base 3: mod_base = OTHER; note = LNA guanine
  modified_base 16..17: mod_base = OTHER; note = LNA cytosine
  modified_base 18: mod_base = OTHER; note = LNA guanine
gcgaggcggcctcttccg

SEQ ID NO: 42066 - DNA, 18 bp, synthetic construct
  source 1..18: mol_type = other DNA
  misc_feature 1..18: note = phosphothionate-modified backbone between every residue
  modified_base 1: mod_base = OTHER; note = LNA guanine
  modified_base 2..3: mod_base = OTHER; note = LNA cytosine
  modified_base 16..18: mod_base = OTHER; note = LNA guanine
gcctccagctcccccggg

SEQ ID NO: 42067 - DNA, 17 bp, synthetic construct
  source 1..17: mol_type = other DNA
  misc_feature 1..17: note = phosphothionate-modified backbone between every residue
  modified_base 1..2: mod_base = OTHER; note = LNA guanine
  modified_base 3: mod_base = OTHER; note = LNA thymine
  modified_base 15: mod_base = OTHER; note = LNA cytosine
  modified_base 16: mod_base = OTHER; note = LNA adenine
  modified_base 17: mod_base = OTHER; note = LNA thymine
ggtgtcgggagggccat

SEQ ID NO: 42068 - DNA, 18 bp, synthetic construct
  source 1..18: mol_type = other DNA
  misc_feature 1..18: note = phosphothionate-modified backbone between every residue
  modified_base 1: mod_base = OTHER; note = LNA cytosine
  modified_base 2: mod_base = OTHER; note = LNA thymine
  modified_base 3: mod_base = OTHER; note = LNA guanine
  modified_base 16: mod_base = OTHER; note = LNA thymine
  modified_base 17: mod_base = OTHER; note = LNA cytosine
  modified_base 18: mod_base = OTHER; note = LNA thymine
ctgggccagccgttctct

SEQ ID NO: 42069 - DNA, 18 bp, synthetic construct
  source 1..18: mol_type = other DNA
  misc_feature 1..18: note = phosphothionate-modified backbone between every residue
  modified_base 1..3: mod_base = OTHER; note = LNA guanine
  modified_base 16: mod_base = OTHER; note = LNA thymine
  modified_base 17..18: mod_base = OTHER; note = LNA guanine
gggccagccgttctctgg

SEQ ID NO: 42070 - DNA, 18 bp, synthetic construct
  source 1..18: mol_type = other DNA
  misc_feature 1..18: note = phosphothionate-modified backbone between every residue
  modified_base 1: mod_base = OTHER; note = LNA cytosine
  modified_base 2: mod_base = OTHER; note = LNA adenine
  modified_base 15: mod_base = OTHER; note = LNA thymine
  modified_base 17: mod_base = OTHER; note = LNA cytosine
  modified_base 18: mod_base = OTHER; note = LNA thymine
caatttcaggctttttct

SEQ ID NO: 42071 - DNA, 18 bp, synthetic construct
  source 1..18: mol_type = other DNA
  misc_feature 1..18: note = phosphothionate-modified backbone between every residue
  modified_base 1: mod_base = OTHER; note = LNA thymine
  modified_base 2: mod_base = OTHER; note = LNA guanine
  modified_base 3: mod_base = OTHER; note = LNA cytosine
  modified_base 16..17: mod_base = OTHER; note = LNA thymine
  modified_base 18: mod_base = OTHER; note = LNA guanine
tgcctacagaaggctttg

SEQ ID NO: 42072 - DNA, 18 bp, synthetic construct
  source 1..18: mol_type = other DNA
  misc_feature 1..18: note = phosphothionate-modified backbone between every residue
  modified_base 1: mod_base = OTHER; note = LNA adenine
  modified_base 2: mod_base = OTHER; note = LNA thymine
  modified_base 15: mod_base = OTHER; note = LNA cytosine
  modified_base 17: mod_base = OTHER; note = LNA cytosine
  modified_base 18: mod_base = OTHER; note = LNA adenine
atctctgcactcatcaca

SEQ ID NO: 42073 - DNA, 18 bp, synthetic construct
  source 1..18: mol_type = other DNA
  misc_feature 1..18: note = phosphothionate-modified backbone between every residue
  modified_base 1: mod_base = OTHER; note = LNA adenine
  modified_base 2: mod_base = um
  modified_base 3: mod_base = OTHER; note = LNA cytosine
  modified_base 16: mod_base = OTHER; note = LNA adenine
  modified_base 17: mod_base = cm
  modified_base 18: mod_base = OTHER; note = LNA adenine
atctctgcactcatcaca

SEQ ID NO: 42074 - DNA, 18 bp, synthetic construct
  source 1..18: mol_type = other DNA
  misc_feature 1..18: note = phosphothionate-modified backbone between every residue
  modified_base 1: mod_base = OTHER; note = LNA cytosine
  modified_base 2: mod_base = OTHER; note = LNA thymine
  modified_base 15: mod_base = OTHER; note = LNA thymine
  modified_base 17: mod_base = OTHER; note = LNA thymine
  modified_base 18: mod_base = OTHER; note = LNA guanine
ctgatcaccgaagttctg

SEQ ID NO: 42075 - DNA, 18 bp, synthetic construct
  source 1..18: mol_type = other DNA
  misc_feature 1..18: note = phosphothionate-modified backbone between every residue
  modified_base 1..2: mod_base = OTHER; note = LNA cytosine
  modified_base 15: mod_base = OTHER; note = LNA thymine
  modified_base 17: mod_base = OTHER; note = LNA thymine
  modified_base 18: mod_base = OTHER; note = LNA adenine
ccaggagatgtaactcta

SEQ ID NO: 42076 - DNA, 18 bp, synthetic construct
  source 1..18: mol_type = other DNA
  misc_feature 1..18: note = phosphothionate-modified backbone between every residue
  modified_base 1: mod_base = OTHER; note = LNA guanine
  modified_base 2..3: mod_base = OTHER; note = LNA adenine
  modified_base 16: mod_base = OTHER; note = LNA guanine
  modified_base 17..18: mod_base = OTHER; note = LNA cytosine
gaaagagaggccaccgcc

SEQ ID NO: 42077 - DNA, 18 bp, synthetic construct
  source 1..18: mol_type = other DNA
  misc_feature 1..18: note = phosphothionate-modified backbone between every residue
  modified_base 1: mod_base = OTHER; note = LNA guanine
  modified_base 2: mod_base = OTHER; note = LNA thymine
  modified_base 3: mod_base = OTHER; note = LNA adenine
  modified_base 16..17: mod_base = OTHER; note = LNA thymine
  modified_base 18: mod_base = OTHER; note = LNA cytosine
gtagccagccaggtgttc

SEQ ID NO: 42078 - DNA, 18 bp, synthetic construct
  source 1..18: mol_type = other DNA
  misc_feature 1..18: note = phosphothionate-modified backbone between every residue
  modified_base 1: mod_base = OTHER; note = LNA guanine
  modified_base 2: mod_base = um
  modified_base 3: mod_base = OTHER; note = LNA adenine
  modified_base 16: mod_base = um
  modified_base 17: mod_base = OTHER; note = LNA thymine
  modified_base 18: mod_base = OTHER; note = LNA cytosine
gtagccagccaggtgttc

SEQ ID NO: 42079 - DNA, 18 bp, synthetic construct
  source 1..18: mol_type = other DNA
  misc_feature 1..18: note = phosphothionate-modified backbone between every residue
  modified_base 1: mod_base = OTHER; note = LNA guanine
  modified_base 2: mod_base = um
  modified_base 15: mod_base = gm
  modified_base 17: mod_base = OTHER; note = LNA thymine
  modified_base 18: mod_base = OTHER; note = LNA cytosine
gtagccagccaggtgttc

SEQ ID NO: 42080 - DNA, 18 bp, synthetic construct
  source 1..18: mol_type = other DNA
  misc_feature 1..18: note = phosphothionate-modified backbone between every residue
  modified_base 1: mod_base = OTHER; note = LNA guanine
  modified_base 2: mod_base = OTHER; note = LNA thymine
  modified_base 3: mod_base = OTHER; note = LNA adenine
  modified_base 16..17: mod_base = OTHER; note = LNA thymine
  modified_base 18: mod_base = OTHER; note = LNA cytosine
gtagccagccaggtgttc

SEQ ID NO: 42081 - DNA, 18 bp, synthetic construct
  source 1..18: mol_type = other DNA
  misc_feature 1..18: note = phosphothionate-modified backbone between every residue
  modified_base 1: mod_base = OTHER; note = LNA guanine
  modified_base 2..3: mod_base = OTHER; note = LNA cytosine
  modified_base 16: mod_base = OTHER; note = LNA guanine
  modified_base 17..18: mod_base = OTHER; note = LNA cytosine
gcccctccgtagccagcc

SEQ ID NO: 42082 - DNA, 18 bp, synthetic construct
  source 1..18: mol_type = other DNA
  misc_feature 1..18: note = phosphothionate-modified backbone between every residue
  modified_base 1: mod_base = OTHER; note = LNA thymine
  modified_base 2: mod_base = OTHER; note = LNA guanine
  modified_base 3: mod_base = OTHER; note = LNA cytosine
  modified_base 16: mod_base = OTHER; note = LNA thymine
  modified_base 17: mod_base = OTHER; note = LNA cytosine
  modified_base 18: mod_base = OTHER; note = LNA guanine
tgctgtccgagggtgtcg

SEQ ID NO: 42083 - DNA, 18 bp, synthetic construct
  source 1..18: mol_type = other DNA
  misc_feature 1..18: note = phosphothionate-modified backbone between every residue
  modified_base 1: mod_base = OTHER; note = LNA adenine
  modified_base 2..3: mod_base = OTHER; note = LNA guanine
  modified_base 16: mod_base = OTHER; note = LNA guanine
  modified_base 17: mod_base = OTHER; note = LNA adenine
  modified_base 18: mod_base = OTHER; note = LNA guanine
aggggtgcttccagcgag

SEQ ID NO: 42084 - DNA, 18 bp, synthetic construct
  source 1..18: mol_type = other DNA
  misc_feature 1..18: note = phosphothionate-modified backbone between every residue
  modified_base 1..2: mod_base = OTHER; note = LNA thymine
  modified_base 3: mod_base = OTHER; note = LNA cytosine
  modified_base 16..18: mod_base = OTHER; note = LNA guanine
ttcttcctcgctgagggg

SEQ ID NO: 42085 - DNA, 18 bp, synthetic construct
  source 1..18: mol_type = other DNA
  misc_feature 1..18: note = phosphothionate-modified backbone between every residue
  modified_base 1: mod_base = OTHER; note = LNA cytosine
  modified_base 2..3: mod_base = OTHER; note = LNA guanine
  modified_base 16: mod_base = OTHER; note = LNA cytosine
  modified_base 17: mod_base = OTHER; note = LNA thymine
  modified_base 18: mod_base = OTHER; note = LNA guanine
cggtattcttcctcgctg

SEQ ID NO: 42086 - DNA, 18 bp, synthetic construct
  source 1..18: mol_type = other DNA
  misc_feature 1..18: note = phosphothionate-modified backbone between every residue
  modified_base 1: mod_base = OTHER; note = LNA thymine
  modified_base 2..3: mod_base = OTHER; note = LNA cytosine
  modified_base 16: mod_base = OTHER; note = LNA cytosine
  modified_base 17..18: mod_base = OTHER; note = LNA guanine
tcctccagcagagcccgg

SEQ ID NO: 42087 - DNA, 18 bp, synthetic construct
  source 1..18: mol_type = other DNA
  misc_feature 1..18: note = phosphothionate-modified backbone between every residue
  modified_base 1..2: mod_base = OTHER; note = LNA cytosine
  modified_base 3: mod_base = OTHER; note = LNA thymine
  modified_base 16..17: mod_base = OTHER; note = LNA guanine
  modified_base 18: mod_base = OTHER; note = LNA adenine
cctgggccggctctggga

SEQ ID NO: 42088 - DNA, 18 bp, synthetic construct
  source 1..18: mol_type = other DNA
  misc_feature 1..18: note = phosphothionate-modified backbone between every residue
  modified_base 1: mod_base = OTHER; note = LNA thymine
  modified_base 2: mod_base = OTHER; note = LNA guanine
  modified_base 3: mod_base = OTHER; note = LNA cytosine
  modified_base 16: mod_base = OTHER; note = LNA cytosine
  modified_base 17..18: mod_base = OTHER; note = LNA guanine
tgctggtacctgggccgg

SEQ ID NO: 42089 - DNA, 18 bp, synthetic construct
  source 1..18: mol_type = other DNA
  misc_feature 1..18: note = phosphothionate-modified backbone between every residue
  modified_base 1: mod_base = OTHER; note = LNA thymine
  modified_base 2: mod_base = OTHER; note = LNA cytosine
  modified_base 3: mod_base = OTHER; note = LNA thymine
  modified_base 16..18: mod_base = OTHER; note = LNA guanine
tctataggatccacaggg

SEQ ID NO: 42090 - DNA, 18 bp, synthetic construct
  source 1..18: mol_type = other DNA
  misc_feature 1..18: note = phosphothionate-modified backbone between every residue
  modified_base 1: mod_base = OTHER; note = LNA thymine
  modified_base 2: mod_base = OTHER; note = LNA cytosine
  modified_base 4: mod_base = OTHER; note = LNA adenine
  modified_base 17..18: mod_base = OTHER; note = LNA guanine
tctataggatccacaggg

SEQ ID NO: 42091 - DNA, 18 bp, synthetic construct
  source 1..18: mol_type = other DNA
  misc_feature 1..18: note = phosphothionate-modified backbone between every residue
  misc_feature 1: note = 5' amino-carbon 6 chain
  modified_base 1: mod_base = OTHER; note = LNA thymine
  modified_base 2: mod_base = OTHER; note = LNA cytosine
  modified_base 3: mod_base = OTHER; note = LNA thymine
  modified_base 16..18: mod_base = OTHER; note = LNA guanine
tctataggatccacaggg

SEQ ID NO: 42092 - DNA, 16 bp, synthetic construct
  source 1..16: mol_type = other DNA
  misc_feature 1..16: note = phosphothionate-modified backbone between every residue
  modified_base 1: mod_base = OTHER; note = LNA adenine
  modified_base 2: mod_base = cm
  modified_base 3: mod_base = OTHER; note = LNA adenine
  modified_base 14: mod_base = OTHER; note = LNA guanine
  modified_base 15: mod_base = um
  modified_base 16: mod_base = OTHER; note = LNA guanine
acagcgtcggaaggtg

SEQ ID NO: 42093 - DNA, 16 bp, synthetic construct
  source 1..16: mol_type = other DNA
  misc_feature 1..16: note = phosphothionate-modified backbone between every residue
  modified_base 1: mod_base = OTHER; note = LNA cytosine
  modified_base 2: mod_base = OTHER; note = 2'-O-methyladenine
  modified_base 3: mod_base = OTHER; note = LNA guanine
  modified_base 14: mod_base = OTHER; note = LNA cytosine
  modified_base 15: mod_base = cm
  modified_base 16: mod_base = OTHER; note = LNA guanine
caggaatcccaggccg

SEQ ID NO: 42094 - DNA, 15 bp, synthetic construct
  source 1..15: mol_type = other DNA
  misc_feature 1..15: note = phosphothionate-modified backbone between every residue
  modified_base 1: mod_base = OTHER; note = LNA cytosine
  modified_base 2: mod_base = OTHER; note = 2'-O-methyladenine
  modified_base 3: mod_base = OTHER; note = LNA guanine
  modified_base 13: mod_base = OTHER; note = LNA guanine
  modified_base 14: mod_base = cm
  modified_base 15: mod_base = OTHER; note = LNA cytosine
caggaatcccaggcc

SEQ ID NO: 42095 - DNA, 20 bp, synthetic construct
  source 1..20: mol_type = other DNA
  misc_feature 1..20: note = phosphothionate-modified backbone between every residue
  modified_base 1: mod_base = OTHER; note = LNA cytosine
  modified_base 2: mod_base = gm
  modified_base 4: mod_base = OTHER; note = LNA cytosine
  modified_base 15..16: mod_base = OTHER; note = LNA cytosine
  modified_base 19: mod_base = OTHER; note = LNA guanine
  modified_base 20: mod_base = OTHER; note = LNA adenine
cggctctgggatccccggga

SEQ ID NO: 42096 - DNA, 16 bp, synthetic construct
  source 1..16: mol_type = other DNA
  misc_feature 1..16: note = phosphothionate-modified backbone between every residue
  modified_base 1..2: mod_base = OTHER; note = LNA guanine
  modified_base 14..15: mod_base = cm
  modified_base 16: mod_base = OTHER; note = LNA guanine
ggctctgggatccccg

SEQ ID NO: 42097 - DNA, 15 bp, synthetic construct
  source 1..15: mol_type = other DNA
  misc_feature 1..15: note = phosphothionate-modified backbone between every residue
  modified_base 1..2: mod_base = OTHER; note = LNA guanine
  modified_base 13..14: mod_base = cm
  modified_base 15: mod_base = OTHER; note = LNA cytosine
ggctctgggatcccc

SEQ ID NO: 42098 - DNA, 20 bp, synthetic construct
  source 1..20: mol_type = other DNA
  misc_feature 1..20: note = phosphothionate-modified backbone between every residue
  modified_base 1: mod_base = OTHER; note = LNA thymine
  modified_base 2: mod_base = OTHER; note = LNA adenine
  modified_base 4: mod_base = OTHER; note = LNA adenine
  modified_base 16..17: mod_base = OTHER; note = LNA guanine
  modified_base 19..20: mod_base = OTHER; note = LNA guanine
tagacagcgtcggaaggtgg

SEQ ID NO: 42099 - DNA, 20 bp, synthetic construct
  source 1..20: mol_type = other DNA
  misc_feature 1..20: note = phosphothionate-modified backbone between every residue
  modified_base 1: mod_base = OTHER; note = LNA guanine
  modified_base 2: mod_base = OTHER; note = 2'-O-methyladenine
  modified_base 3: mod_base = OTHER; note = LNA guanine
  modified_base 16: mod_base = OTHER; note = LNA thymine
  modified_base 17: mod_base = OTHER; note = LNA cytosine
  modified_base 19: mod_base = OTHER; note = LNA guanine
  modified_base 20: mod_base = OTHER; note = LNA cytosine
gagctcccttgcacgtcagc

SEQ ID NO: 42100 - DNA, 16 bp, synthetic construct
  source 1..16: mol_type = other DNA
  misc_feature 1..16: note = phosphothionate-modified backbone between every residue
  modified_base 1: mod_base = OTHER; note = LNA adenine
  modified_base 2: mod_base = gm
  modified_base 3: mod_base = OTHER; note = LNA cytosine
  modified_base 14: mod_base = OTHER; note = LNA guanine
  modified_base 15: mod_base = um
  modified_base 16: mod_base = OTHER; note = LNA cytosine
agctcccttgcacgtc

SEQ ID NO: 42101 - DNA, 16 bp, synthetic construct
  source 1..16: mol_type = other DNA
  misc_feature 1..16: note = phosphothionate-modified backbone between every residue
  modified_base 1: mod_base = OTHER; note = LNA adenine
  modified_base 2: mod_base = OTHER; note = LNA guanine
  modified_base 15: mod_base = OTHER; note = LNA thymine
  modified_base 16: mod_base = OTHER; note = LNA cytosine
agctcccttgcacgtc

SEQ ID NO: 42102 - DNA, 16 bp, synthetic construct
  source 1..16: mol_type = other DNA
  misc_feature 1..16: note = phosphothionate-modified backbone between every residue
  modified_base 1: mod_base = OTHER; note = LNA guanine
  modified_base 2: mod_base = OTHER; note = 2'-O-methyladenine
  modified_base 3: mod_base = OTHER; note = LNA guanine
  modified_base 14: mod_base = OTHER; note = LNA cytosine
  modified_base 15: mod_base = gm
  modified_base 16: mod_base = OTHER; note = LNA thymine
gagctcccttgcacgt

SEQ ID NO: 42103 - DNA, 15 bp, synthetic construct
  source 1..15: mol_type = other DNA
  misc_feature 1..15: note = phosphothionate-modified backbone between every residue
  modified_base 1: mod_base = OTHER; note = LNA guanine
  modified_base 2: mod_base = OTHER; note = 2'-O-methyladenine
  modified_base 3: mod_base = OTHER; note = LNA guanine
  modified_base 13: mod_base = OTHER; note = LNA adenine
  modified_base 14: mod_base = cm
  modified_base 15: mod_base = OTHER; note = LNA guanine
gagctcccttgcacg

SEQ ID NO: 42104 - DNA, 20 bp, synthetic construct
  source 1..20: mol_type = other DNA
  misc_feature 1..20: note = phosphothionate-modified backbone between every residue
  modified_base 1: mod_base = OTHER; note = LNA cytosine
  modified_base 2: mod_base = OTHER; note = LNA guanine
  modified_base 4: mod_base = OTHER; note = LNA adenine
  modified_base 15: mod_base = OTHER; note = LNA thymine
  modified_base 16: mod_base = gm
  modified_base 19..20: mod_base = OTHER; note = LNA cytosine
cgtagccagccaggtgttcc

SEQ ID NO: 42105 - DNA, 15 bp, synthetic construct
  source 1..15: mol_type = other DNA
  misc_feature 1..15: note = phosphothionate-modified backbone between every residue
  modified_base 1: mod_base = OTHER; note = LNA thymine
  modified_base 2: mod_base = OTHER; note = 2'-O-methyladenine
  modified_base 3: mod_base = OTHER; note = LNA guanine
  modified_base 13: mod_base = OTHER; note = LNA thymine
  modified_base 14: mod_base = gm
  modified_base 15: mod_base = OTHER; note = LNA thymine
tagccagccaggtgt

SEQ ID NO: 42106 - DNA, 20 bp, synthetic construct
  source 1..20: mol_type = other DNA
  misc_feature 1..20: note = phosphothionate-modified backbone between every residue
  modified_base 1: mod_base = OTHER; note = LNA cytosine
  modified_base 2: mod_base = OTHER; note = LNA thymine
  modified_base 5: mod_base = OTHER; note = LNA thymine
  modified_base 6: mod_base = OTHER; note = LNA adenine
  modified_base 18..20: mod_base = OTHER; note = LNA guanine
cttctataggatccacaggg

SEQ ID NO: 42107 - DNA, 20 bp, synthetic construct
  source 1..20: mol_type = other DNA
  misc_feature 1..20: note = phosphothionate-modified backbone between every residue
  modified_base 1..2: mod_base = OTHER; note = 2'-methyloxyethyl thymine
  modified_base 3: mod_base = OTHER; note = 2'-methyloxyethyl cytosine
  modified_base 4: mod_base = OTHER; note = 2'-methyloxyethyl thymine
  modified_base 17..19: mod_base = OTHER; note = 2'-methyloxyethyl guanine
  modified_base 20: mod_base = OTHER; note = 2'-methyloxyethyl cytosine
ttctataggatccacagggc

SEQ ID NO: 42108 - DNA, 20 bp, synthetic construct
  source 1..20: mol_type = other DNA
  misc_feature 1..20: note = phosphothionate-modified backbone between every residue
  modified_base 1: mod_base = OTHER; note = LNA adenine
  modified_base 2: mod_base = OTHER; note = LNA thymine
  modified_base 15: mod_base = OTHER; note = LNA adenine
  modified_base 16: mod_base = um
  modified_base 19: mod_base = OTHER; note = LNA cytosine
  modified_base 20: mod_base = OTHER; note = LNA adenine
atgcccaggaaagaatggca

SEQ ID NO: 42109 - DNA, 18 bp, synthetic construct
  source 1..18: mol_type = other DNA
  misc_feature 1..18: note = phosphothionate-modified backbone between every residue
  modified_base 1: mod_base = OTHER; note = LNA cytosine
  modified_base 2: mod_base = OTHER; note = 2'-O-methyladenine
  modified_base 3: mod_base = OTHER; note = LNA adenine
  modified_base 15: mod_base = OTHER; note = LNA guanine
  modified_base 17: mod_base = OTHER; note = LNA thymine
  modified_base 18: mod_base = OTHER; note = LNA adenine
caaagacagacagaggta

SEQ ID NO: 42110 - DNA, 17 bp, synthetic construct
  source 1..17: mol_type = other DNA
  misc_feature 1..17: note = phosphothionate-modified backbone between every residue
  modified_base 1: mod_base = OTHER; note = LNA guanine
  modified_base 2: mod_base = um
  modified_base 3: mod_base = OTHER; note = LNA cytosine
  modified_base 15: mod_base = cm
  modified_base 16: mod_base = OTHER; note = LNA cytosine
  modified_base 17: mod_base = OTHER; note = LNA adenine
gtcctaaagctcctcca

SEQ ID NO: 42111 - DNA, 17 bp, synthetic construct
  source 1..17: mol_type = other DNA
  misc_feature 1..17: note = phosphothionate-modified backbone between every residue
  modified_base 2: mod_base = OTHER; note = LNA cytosine
  modified_base 15: mod_base = OTHER; note = LNA cytosine
  modified_base 16: mod_base = OTHER; note = 2'-O-methyladenine
  modified_base 17: mod_base = OTHER; note = LNA guanine
tcctaaagctcctccag

SEQ ID NO: 42112 - DNA, 17 bp, synthetic construct
  source 1..17: mol_type = other DNA
  misc_feature 1..17: note = phosphothionate-modified backbone between every residue
  modified_base 1..2: mod_base = OTHER; note = LNA guanine
  modified_base 4: mod_base = OTHER; note = LNA adenine
  modified_base 5: mod_base = OTHER; note = LNA thymine
  modified_base 16: mod_base = OTHER; note = LNA thymine
  modified_base 17: mod_base = OTHER; note = LNA guanine
gggatgccttgcatctg

SEQ ID NO: 42113 - DNA, 17 bp, synthetic construct
  source 1..17: mol_type = other DNA
  misc_feature 1..17: note = phosphothionate-modified backbone between every residue
  modified_base 1: mod_base = OTHER; note = LNA guanine
  modified_base 2..3: mod_base = OTHER; note = LNA adenine
  modified_base 14: mod_base = OTHER; note = LNA adenine
  modified_base 16: mod_base = OTHER; note = LNA thymine
  modified_base 17: mod_base = OTHER; note = LNA cytosine
gaaaccagatctgaatc

SEQ ID NO: 42114 - DNA, 17 bp, synthetic construct
  source 1..17: mol_type = other DNA
  misc_feature 1..17: note = phosphothionate-modified backbone between every residue
  modified_base 1..3: mod_base = OTHER; note = LNA guanine
  modified_base 14: mod_base = OTHER; note = LNA thymine
  modified_base 16: mod_base = OTHER; note = LNA thymine
  modified_base 17: mod_base = OTHER; note = LNA cytosine
gggtccaaacgagtctc

SEQ ID NO: 42115 - DNA, 16 bp, synthetic construct
  source 1..16: mol_type = other DNA
  misc_feature 1..16: note = phosphothionate-modified backbone between every residue
  modified_base 1: mod_base = OTHER; note = LNA guanine
  modified_base 2: mod_base = cm
  modified_base 3: mod_base = OTHER; note = LNA thymine
  modified_base 14: mod_base = OTHER; note = LNA cytosine
  modified_base 15: mod_base = gm
  modified_base 16: mod_base = OTHER; note = LNA guanine
gctgcagaaactccgg

SEQ ID NO: 42116 - DNA, 16 bp, synthetic construct
  source 1..16: mol_type = other DNA
  misc_feature 1..16: note = phosphothionate-modified backbone between every residue
  modified_base 1: mod_base = OTHER; note = LNA thymine
  modified_base 2: mod_base = gm
  modified_base 3: mod_base = OTHER; note = LNA thymine
  modified_base 14: mod_base = OTHER; note = LNA adenine
  modified_base 15: mod_base = OTHER; note = LNA guanine
  modified_base 16: mod_base = OTHER; note = LNA adenine
tgttccccgcgaaaga

SEQ ID NO: 42117 - DNA, 16 bp, synthetic construct
  source 1..16: mol_type = other DNA
  misc_feature 1..16: note = phosphothionate-modified backbone between every residue
  modified_base 1: mod_base = OTHER; note = LNA guanine
  modified_base 2: mod_base = OTHER; note = LNA thymine
  modified_base 3: mod_base = OTHER; note = LNA guanine
  modified_base 14: mod_base = OTHER; note = LNA guanine
  modified_base 15: mod_base = OTHER; note = LNA cytosine
  modified_base 16: mod_base = OTHER; note = LNA adenine
gtgacatatctctgca

SEQ ID NO: 42118 - DNA, 16 bp, synthetic construct
  source 1..16: mol_type = other DNA
  misc_feature 1..16: note = phosphothionate-modified backbone between every residue
  modified_base 1: mod_base = OTHER; note = LNA cytosine
  modified_base 2: mod_base = OTHER; note = LNA adenine
  modified_base 3: mod_base = um
  modified_base 14: mod_base = um
  modified_base 15: mod_base = OTHER; note = LNA cytosine
  modified_base 16: mod_base = OTHER; note = LNA adenine
catatctctgcactca

SEQ ID NO: 42119 - DNA, 16 bp, synthetic construct
  source 1..16: mol_type = other DNA
  misc_feature 1..16: note = phosphothionate-modified backbone between every residue
  modified_base 1: mod_base = OTHER; note = LNA guanine
  modified_base 2: mod_base = OTHER; note = LNA adenine
  modified_base 13: mod_base = OTHER; note = LNA cytosine
  modified_base 15: mod_base = OTHER; note = LNA cytosine
  modified_base 16: mod_base = OTHER; note = LNA thymine
gacatatctctgcact

SEQ ID NO: 42120 - DNA, 16 bp, synthetic construct
  source 1..16: mol_type = other DNA
  misc_feature 1..16: note = phosphothionate-modified backbone between every residue
  modified_base 1..3: mod_base = OTHER; note = LNA guanine
  modified_base 14: mod_base = gm
  modified_base 15: mod_base = OTHER; note = LNA thymine
  modified_base 16: mod_base = OTHER; note = LNA cytosine
ggggtccaaacgagtc

SEQ ID NO: 42121 - DNA, 16 bp, synthetic construct
  source 1..16: mol_type = other DNA
  misc_feature 1..16: note = phosphothionate-modified backbone between every residue
  modified_base 1: mod_base = OTHER; note = LNA thymine
  modified_base 2: mod_base = OTHER; note = 2'-O-methyladenine
  modified_base 3: mod_base = OTHER; note = LNA cytosine
  modified_base 14: mod_base = OTHER; note = LNA guanine
  modified_base 15: mod_base = um
  modified_base 16: mod_base = OTHER; note = LNA guanine
tacaggggatattgtg

SEQ ID NO: 42122 - DNA, 15 bp, synthetic construct
  source 1..15: mol_type = other DNA
  misc_feature 1..15: note = phosphothionate-modified backbone between every residue
  modified_base 1: mod_base = OTHER; note = LNA adenine
  modified_base 2: mod_base = gm
  modified_base 3: mod_base = cm
  modified_base 13: mod_base = um
  modified_base 14: mod_base = gm
  modified_base 15: mod_base = OTHER; note = LNA guanine
agcagggcggtctgg

SEQ ID NO: 42123 - DNA, 15 bp, synthetic construct
  source 1..15: mol_type = other DNA
  misc_feature 1..15: note = phosphothionate-modified backbone between every residue
  modified_base 1: mod_base = OTHER; note = LNA adenine
  modified_base 2: mod_base = gm
  modified_base 3: mod_base = OTHER; note = LNA cytosine
  modified_base 14: mod_base = um
  modified_base 15: mod_base = OTHER; note = LNA guanine
agctgccccggcttg

SEQ ID NO: 42124 - DNA, 15 bp, synthetic construct
  source 1..15: mol_type = other DNA
  misc_feature 1..15: note = phosphothionate-modified backbone between every residue
  modified_base 1: mod_base = OTHER; note = LNA cytosine
  modified_base 2: mod_base = cm
  modified_base 3: mod_base = OTHER; note = LNA cytosine
  modified_base 13: mod_base = OTHER; note = LNA adenine
  modified_base 14: mod_base = gm
  modified_base 15: mod_base = OTHER; note = LNA guanine
cccaggaaagaaagg

SEQ ID NO: 42125 - DNA, 16 bp, synthetic construct
  source 1..16: mol_type = other DNA
  misc_feature 1..16: note = phosphothionate-modified backbone between every residue
  modified_base 1..2: mod_base = OTHER; note = LNA guanine
  modified_base 3: mod_base = um
  modified_base 15..16: mod_base = OTHER; note = LNA guanine
ggtgagccccggccgg

SEQ ID NO: 42126 - DNA, 15 bp, synthetic construct
  source 1..15: mol_type = other DNA
  misc_feature 1..15: note = phosphothionate-modified backbone between every residue
  modified_base 1: mod_base = OTHER; note = LNA guanine
  modified_base 2: mod_base = OTHER; note = LNA cytosine
  modified_base 14..15: mod_base = OTHER; note = LNA cytosine
gcagaccagggcgcc

SEQ ID NO: 42127 - DNA, 15 bp, synthetic construct
  source 1..15: mol_type = other DNA
  misc_feature 1..15: note = phosphothionate-modified backbone between every residue
  modified_base 1..2: mod_base = OTHER; note = LNA cytosine
  modified_base 3: mod_base = um
  modified_base 13: mod_base = OTHER; note = LNA cytosine
  modified_base 14: mod_base = um
  modified_base 15: mod_base = OTHER; note = LNA guanine
cctgggccggctctg

SEQ ID NO: 42128 - DNA, 15 bp, synthetic construct
  source 1..15: mol_type = other DNA
  misc_feature 1..15: note = phosphothionate-modified backbone between every residue
  modified_base 1..2: mod_base = OTHER; note = LNA cytosine
  modified_base 14: mod_base = OTHER; note = LNA thymine
  modified_base 15: mod_base = OTHER; note = LNA guanine
cctgggccggctctg

SEQ ID NO: 42129 - DNA, 20 bp, synthetic construct
  source 1..20: mol_type = other DNA
  misc_feature 1..20: note = phosphothionate-modified backbone between every residue
  modified_base 1: mod_base = OTHER; note = 2'-methyloxyethyl adenine
  modified_base 2: mod_base = OTHER; note = 2'-methyloxyethyl guanine
  modified_base 3..4: mod_base = OTHER; note = 2'-methyloxyethyl adenine
  modified_base 17: mod_base = OTHER; note = 2'-methyloxyethyl adenine
  modified_base 18..19: mod_base = OTHER; note = 2'-methyloxyethyl guanine
  modified_base 20: mod_base = OTHER; note = 2'-methyloxyethyl cytosine
agaaggcaggaatcccaggc

SEQ ID NO: 42130 - DNA, 20 bp, synthetic construct
  source 1..20: mol_type = other DNA
  misc_feature 1..20: note = phosphothionate-modified backbone between every residue
  modified_base 1: mod_base = OTHER; note = LNA adenine
  modified_base 2: mod_base = OTHER; note = LNA guanine
  modified_base 3: mod_base = OTHER; note = LNA adenine
  modified_base 17: mod_base = OTHER; note = 2'-O-methyladenine
  modified_base 18: mod_base = OTHER; note = LNA guanine
  modified_base 19: mod_base = gm
  modified_base 20: mod_base = OTHER; note = LNA cytosine
agaaggcaggaatcccaggc

SEQ ID NO: 42131 - DNA, 17 bp, synthetic construct
  source 1..17: mol_type = other DNA
  misc_feature 1..17: note = phosphothionate-modified backbone between every residue
  modified_base 1: mod_base = OTHER; note = LNA cytosine
  modified_base 2: mod_base = OTHER; note = LNA guanine
  modified_base 14: mod_base = cm
  modified_base 16: mod_base = OTHER; note = LNA thymine
  modified_base 17: mod_base = OTHER; note = LNA cytosine
cgggtgcctggcccttc

SEQ ID NO: 42132 - DNA, 16 bp, synthetic construct
  source 1..16: mol_type = other DNA
  misc_feature 1..16: note = phosphothionate-modified backbone between every residue
  modified_base 1..2: mod_base = OTHER; note = LNA cytosine
  modified_base 15: mod_base = gm
  modified_base 16: mod_base = OTHER; note = LNA cytosine
ccagctcctcccgggc

SEQ ID NO: 42133 - DNA, 18 bp, synthetic construct
  source 1..18: mol_type = other DNA
  misc_feature 1..18: note = phosphothionate-modified backbone between every residue
  modified_base 1..2: mod_base = OTHER; note = LNA thymine
  modified_base 16: mod_base = OTHER; note = LNA guanine
  modified_base 17: mod_base = cm
  modified_base 18: mod_base = OTHER; note = LNA adenine
ttgtgacatatctctgca

SEQ ID NO: 42134 - DNA, 15 bp, synthetic construct
  source 1..15: mol_type = other DNA
  misc_feature 1..15: note = phosphothionate-modified backbone between every residue
  modified_base 1: mod_base = OTHER; note = LNA cytosine
  modified_base 2: mod_base = um
  modified_base 3: mod_base = OTHER; note = LNA cytosine
  modified_base 13: mod_base = OTHER; note = LNA thymine
  modified_base 14: mod_base = cm
  modified_base 15: mod_base = OTHER; note = LNA adenine
ctcccttgcacgtca

SEQ ID NO: 42135 - DNA, 16 bp, synthetic construct
  source 1..16: mol_type = other DNA
  misc_feature 1..2: note = phosphothionate-modified backbone between every residue
  misc_feature 3..16: note = phosphothionate-modified backbone between every residue
  modified_base 1: mod_base = OTHER; note = LNA guanine
  modified_base 2: mod_base = cm
  modified_base 3: mod_base = OTHER; note = LNA thymine
  modified_base 14: mod_base = OTHER; note = LNA thymine
  modified_base 15: mod_base = cm
  modified_base 16: mod_base = OTHER; note = LNA adenine
gctcccttgcacgtca

SEQ ID NO: 42136 - DNA, 17 bp, synthetic construct
  source 1..17: mol_type = other DNA
  misc_feature 1..17: note = phosphothionate-modified backbone between every residue
  modified_base 1: mod_base = OTHER; note = LNA adenine
  modified_base 2: mod_base = OTHER; note = LNA guanine
  modified_base 4: mod_base = OTHER; note = LNA thymine
  modified_base 15: mod_base = OTHER; note = LNA thymine
  modified_base 16: mod_base = cm
  modified_base 17: mod_base = OTHER; note = LNA adenine
agctcccttgcacgtca

SEQ ID NO: 42137 - DNA, 20 bp, synthetic construct
  source 1..20: mol_type = other DNA
  misc_feature 1..20: note = phosphothionate-modified backbone between every residue
  modified_base 1: mod_base = OTHER; note = 2'-methyloxyethyl cytosine
  modified_base 2: mod_base = OTHER; note = 2'-methyloxyethyl guanine
  modified_base 3: mod_base = OTHER; note = 2'-methyloxyethyl adenine
  modified_base 4: mod_base = OTHER; note = 2'-methyloxyethyl guanine
  modified_base 17: mod_base = OTHER; note = 2'-methyloxyethyl thymine
  modified_base 18: mod_base = OTHER; note = 2'-methyloxyethyl cytosine
  modified_base 19: mod_base = OTHER; note = 2'-methyloxyethyl adenine
  modified_base 20: mod_base = OTHER; note = 2'-methyloxyethyl guanine
cgagctcccttgcacgtcag

SEQ ID NO: 42138 - DNA, 16 bp, synthetic construct
  source 1..16: mol_type = other DNA
  misc_feature 1..16: note = phosphothionate-modified backbone between every residue
  modified_base 1: mod_base = OTHER; note = LNA adenine
  modified_base 2: mod_base = OTHER; note = 2'-O-methyladenine
  modified_base 3: mod_base = OTHER; note = LNA guanine
  modified_base 14: mod_base = OTHER; note = LNA cytosine
  modified_base 15: mod_base = OTHER; note = 2'-O-methyladenine
  modified_base 16: mod_base = OTHER; note = LNA adenine
aagcgatccttctcaa

SEQ ID NO: 42139 - DNA, 15 bp, Homo sapiens
  source 1..15: mol_type = genomic DNA
agtgcaggatatgtt

SEQ ID NO: 42140 - DNA, 18 bp, Homo sapiens
  source 1..18: mol_type = genomic DNA
cctggctctgctggagga

SEQ ID NO: 42141 - DNA, 16 bp, Homo sapiens
  source 1..16: mol_type = genomic DNA
tcctcctgctggatga

SEQ ID NO: 42142 - DNA, 14 bp, Homo sapiens
  source 1..14: mol_type = genomic DNA
acccctggctggca

SEQ ID NO: 42143 - DNA, 14 bp, Homo sapiens
  source 1..14: mol_type = genomic DNA
gcctgctgctggga

SEQ ID NO: 42144 - DNA, 14 bp, Homo sapiens
  source 1..14: mol_type = genomic DNA
gccttgctggatga

SEQ ID NO: 42145 - DNA, 16 bp, Homo sapiens
  source 1..16: mol_type = genomic DNA
cccgccggggctctcc

SEQ ID NO: 42146 - DNA, 14 bp, Homo sapiens
  source 1..14: mol_type = genomic DNA
ggagcctggtctgc

SEQ ID NO: 42147 - DNA, 14 bp, Homo sapiens
  source 1..14: mol_type = genomic DNA
gccctgctggatga

SEQ ID NO: 42148 - DNA, 15 bp, Homo sapiens
  source 1..15: mol_type = genomic DNA
caccgcggagaatgc

SEQ ID NO: 42149 - DNA, 15 bp, Homo sapiens
  source 1..15: mol_type = genomic DNA
actgactccgcggag

SEQ ID NO: 42150 - DNA, 15 bp, Homo sapiens
  source 1..15: mol_type = genomic DNA
acatgaagggagctc

SEQ ID NO: 42151 - DNA, 16 bp, Homo sapiens
  source 1..16: mol_type = genomic DNA
ggctgctgctggatga

SEQ ID NO: 42152 - DNA, 13 bp, Homo sapiens
  source 1..13: mol_type = genomic DNA
ccaccttccgact

SEQ ID NO: 42153 - DNA, 13 bp, Homo sapiens
  source 1..13: mol_type = genomic DNA
caccttccgactg

SEQ ID NO: 42154 - DNA, 14 bp, Homo sapiens
  source 1..14: mol_type = genomic DNA
ccaccttccgactg

SEQ ID NO: 42155 - DNA, 15 bp, Homo sapiens
  source 1..15: mol_type = genomic DNA
agcctgggattactg

SEQ ID NO: 42156 - DNA, 14 bp, Homo sapiens
  source 1..14: mol_type = genomic DNA
acacctggcttcta

SEQ ID NO: 42157 - DNA, 15 bp, Homo sapiens
  source 1..15: mol_type = genomic DNA
aacacctggcttcta

SEQ ID NO: 42158 - DNA, 15 bp, Homo sapiens
  source 1..15: mol_type = genomic DNA
gcccagaggagctgg

SEQ ID NO: 42159 - DNA, 16 bp, Homo sapiens
  source 1..16: mol_type = genomic DNA
gcgcgggaggagcggg

SEQ ID NO: 42160 - DNA, 14 bp, Homo sapiens
  source 1..14: mol_type = genomic DNA
tgacgtgcaagcgg

SEQ ID NO: 42161 - DNA, 16 bp, Homo sapiens
  source 1..16: mol_type = genomic DNA
gcggccgggcgcccgc

SEQ ID NO: 42162 - DNA, 16 bp, Homo sapiens
  source 1..16: mol_type = genomic DNA
ctggaggagcttcaga

SEQ ID NO: 42163 - DNA, 17 bp, Homo sapiens
  source 1..17: mol_type = genomic DNA
gacctctgctgtctttg

SEQ ID NO: 42164 - DNA, 14 bp, Homo sapiens
  source 1..14: mol_type = genomic DNA
acacctggctgctg

SEQ ID NO: 42165 - DNA, 15 bp, Homo sapiens
  source 1..15: mol_type = genomic DNA
gcctctttggacccc

SEQ ID NO: 42166 - DNA, 16 bp, Homo sapiens
  source 1..16: mol_type = genomic DNA
gccttctgctggatga

SEQ ID NO: 42167 - DNA, 16 bp, Homo sapiens
  source 1..16: mol_type = genomic DNA
gcggccgggcgcccgc

SEQ ID NO: 42168 - DNA, 15 bp, Homo sapiens
  source 1..15: mol_type = genomic DNA
ggctgctgctggaga

SEQ ID NO: 42169 - DNA, 15 bp, Homo sapiens
  source 1..15: mol_type = genomic DNA
gaggccctcccggca

SEQ ID NO: 42170 - DNA, 14 bp, Homo sapiens
  source 1..14: mol_type = genomic DNA
caagccggggagcg

SEQ ID NO: 42171 - DNA, 14 bp, Homo sapiens
  source 1..14: mol_type = genomic DNA
cccgcggagaacgc

SEQ ID NO: 42172 - DNA, 16 bp, Homo sapiens
  source 1..16: mol_type = genomic DNA
gcctgctgctggacgg

SEQ ID NO: 42173 - DNA, 14 bp, Homo sapiens
  source 1..14: mol_type = genomic DNA
gctgctgctggaga

SEQ ID NO: 42174 - DNA, 16 bp, Homo sapiens
  source 1..16: mol_type = genomic DNA
gcccgggaggcgcggg

SEQ ID NO: 42175 - DNA, 17 bp, Homo sapiens
  source 1..17: mol_type = genomic DNA
cgctcgtggcctctctg

SEQ ID NO: 42176 - DNA, 15 bp, Homo sapiens
  source 1..15: mol_type = genomic DNA
cctgatgattagtga

SEQ ID NO: 42177 - DNA, 15 bp, Homo sapiens
  source 1..15: mol_type = genomic DNA
gcggggaggagctgg

SEQ ID NO: 42178 - DNA, 15 bp, Homo sapiens
  source 1..15: mol_type = genomic DNA
ctggagggcgcccgc

SEQ ID NO: 42179 - DNA, 14 bp, Homo sapiens
  source 1..14: mol_type = genomic DNA
agtgcaagggactc

SEQ ID NO: 42180 - DNA, 14 bp, Homo sapiens
  source 1..14: mol_type = genomic DNA
agtgcaagggactc

SEQ ID NO: 42181 - DNA, 14 bp, Homo sapiens
  source 1..14: mol_type = genomic DNA
tgacgtgcaagagc

SEQ ID NO: 42182 - DNA, 15 bp, Homo sapiens
  source 1..15: mol_type = genomic DNA
tgacgtgcaagagct

SEQ ID NO: 42183 - DNA, 16 bp, Homo sapiens
  source 1..16: mol_type = genomic DNA
ctggaggagcgtagga

SEQ ID NO: 42184 - DNA, 16 bp, Homo sapiens
  source 1..16: mol_type = genomic DNA
gccccggaggagctgc

SEQ ID NO: 42185 - DNA, 17 bp, Homo sapiens
  source 1..17: mol_type = genomic DNA
gtgctctcaccagccca

SEQ ID NO: 42186 - DNA, 17 bp, Homo sapiens
  source 1..17: mol_type = genomic DNA
atgctctcaccagccca

SEQ ID NO: 42187 - DNA, 17 bp, Homo sapiens
  source 1..17: mol_type = genomic DNA
gtgctctcaccagccca

SEQ ID NO: 42188 - DNA, 18 bp, Homo sapiens
  source 1..18: mol_type = genomic DNA
tttggattcctgccttct

SEQ ID NO: 42189 - DNA, 16 bp, Homo sapiens
  source 1..16: mol_type = genomic DNA
cccgggggagcggagc

SEQ ID NO: 42190 - DNA, 16 bp, Homo sapiens
  source 1..16: mol_type = genomic DNA
ccggagtttctgcgga

SEQ ID NO: 42191 - DNA, 14 bp, Homo sapiens
  source 1..14: mol_type = genomic DNA
cagagccggcaagg

SEQ ID NO: 42192 - DNA, 15 bp, Homo sapiens
  source 1..15: mol_type = genomic DNA
ctggagtttctgcac

SEQ ID NO: 42193 - DNA, 14 bp, Homo sapiens
  source 1..14: mol_type = genomic DNA
ggcgccctggctga

SEQ ID NO: 42194 - DNA, 18 bp, Homo sapiens
  source 1..18: mol_type = genomic DNA
ccctctctgtgccctggt

SEQ ID NO: 42195 - DNA, 15 bp, Homo sapiens
  source 1..15: mol_type = genomic DNA
ccggccggggccgcc

SEQ ID NO: 42196 - DNA, 14 bp, Homo sapiens
  source 1..14: mol_type = genomic DNA
gggcgggcgcccgc

SEQ ID NO: 42197 - DNA, 16 bp, Homo sapiens
  source 1..16: mol_type = genomic DNA
gggagctgctggccct

SEQ ID NO: 42198 - DNA, 18 bp, Homo sapiens
  source 1..18: mol_type = genomic DNA
ctcaggggagctggaggc

SEQ ID NO: 42199 - DNA, 14 bp, Homo sapiens
  source 1..14: mol_type = genomic DNA
ggggcctggtctgc

SEQ ID NO: 42200 - DNA, 14 bp, Homo sapiens
  source 1..14: mol_type = genomic DNA
gcttctttcctggg

SEQ ID NO: 42201 - DNA, 14 bp, Homo sapiens
  source 1..14: mol_type = genomic DNA
acacctggctgcta

SEQ ID NO: 42202 - DNA, 15 bp, Homo sapiens
  source 1..15: mol_type = genomic DNA
cacacctggctgcta

SEQ ID NO: 42203 - DNA, 16 bp, Homo sapiens
  source 1..16: mol_type = genomic DNA
cccgggggagcggggc

SEQ ID NO: 42204 - DNA, 15 bp, Homo sapiens
  source 1..15: mol_type = genomic DNA
cctttctgtcctggg

SEQ ID NO: 42205 - DNA, 14 bp, Homo sapiens
  source 1..14: mol_type = genomic DNA
accctggctggcca

SEQ ID NO: 42206 - DNA, 15 bp, Homo sapiens
  source 1..15: mol_type = genomic DNA
tcctgctgctggtga

SEQ ID NO: 42207 - DNA, 15 bp, Homo sapiens
  source 1..15: mol_type = genomic DNA
ggcctgggatgcccg

SEQ ID NO: 42208 - DNA, 16 bp, Homo sapiens
  source 1..16: mol_type = genomic DNA
ctggaggagcattaga

SEQ ID NO: 42209 - DNA, 14 bp, Homo sapiens
  source 1..14: mol_type = genomic DNA
caggccggcccagc

SEQ ID NO: 42210 - DNA, 14 bp, Homo sapiens
  source 1..14: mol_type = genomic DNA
caccttccgaactg

SEQ ID NO: 42211 - DNA, 14 bp, Homo sapiens
  source 1..14: mol_type = genomic DNA
gcagccgccctgct

SEQ ID NO: 42212 - DNA, 15 bp, Homo sapiens
  source 1..15: mol_type = genomic DNA
tctctctttcctggg

SEQ ID NO: 42213 - DNA, 15 bp, Homo sapiens
  source 1..15: mol_type = genomic DNA
cggcgccggcccagg

SEQ ID NO: 42214 - DNA, 16 bp, Homo sapiens
  source 1..16: mol_type = genomic DNA
tccctgtggattctct

SEQ ID NO: 42215 - DNA, 15 bp, Homo sapiens
  source 1..15: mol_type = genomic DNA
tccctgtggattcat

SEQ ID NO: 42216 - DNA, 15 bp, Homo sapiens
  source 1..15: mol_type = genomic DNA
gcccgggaggcctgg

SEQ ID NO: 42217 - DNA, 15 bp, Homo sapiens
  source 1..15: mol_type = genomic DNA
ggcgcccgggtctgc

SEQ ID NO: 42218 - DNA, 16 bp, Homo sapiens
  source 1..16: mol_type = genomic DNA
cggggatccccgagca

SEQ ID NO: 42219 - DNA, 16 bp, Homo sapiens
  source 1..16: mol_type = genomic DNA
gcctgctgctggctgc

SEQ ID NO: 42220 - DNA, 16 bp, Homo sapiens
  source 1..16: mol_type = genomic DNA
tctttcgcggggaaga

SEQ ID NO: 42221 - DNA, 17 bp, Homo sapiens
  source 1..17: mol_type = genomic DNA
gggagctgctggcctca

SEQ ID NO: 42222 - DNA, 16 bp, Homo sapiens
  source 1..16: mol_type = genomic DNA
ccagccggggctcccc

SEQ ID NO: 42223 - DNA, 16 bp, Homo sapiens
  source 1..16: mol_type = genomic DNA
gacctggaggagctgg

SEQ ID NO: 42224 - DNA, 14 bp, Homo sapiens
  source 1..14: mol_type = genomic DNA
cggagccggcccgg

SEQ ID NO: 42225 - DNA, 16 bp, Homo sapiens
  source 1..16: mol_type = genomic DNA
gccccggaggagctgg

SEQ ID NO: 42226 - DNA, 16 bp, Homo sapiens
  source 1..16: mol_type = genomic DNA
gctccggaggagctgg

SEQ ID NO: 42227 - DNA, 18 bp, Homo sapiens
  source 1..18: mol_type = genomic DNA
tccggaggagctggaggc

SEQ ID NO: 42228 - DNA, 14 bp, Homo sapiens
  source 1..14: mol_type = genomic DNA
ccaccttccgagcc

SEQ ID NO: 42229 - DNA, 15 bp, Homo sapiens
  source 1..15: mol_type = genomic DNA
tgagtgcagagtatc

SEQ ID NO: 42230 - DNA, 16 bp, Homo sapiens
  source 1..16: mol_type = genomic DNA
tccggctgctggatga

SEQ ID NO: 42231 - DNA, 17 bp, Homo sapiens
  source 1..17: mol_type = genomic DNA
ggctggctcagaggggc

SEQ ID NO: 42232 - DNA, 14 bp, Homo sapiens
  source 1..14: mol_type = genomic DNA
caagccggcccagc

SEQ ID NO: 42233 - DNA, 15 bp, Homo sapiens
  source 1..15: mol_type = genomic DNA
gcccgggcgagctgg

SEQ ID NO: 42234 - DNA, 15 bp, Homo sapiens
  source 1..15: mol_type = genomic DNA
gccaggaggagctgg

SEQ ID NO: 42235 - DNA, 16 bp, Homo sapiens
  source 1..16: mol_type = genomic DNA
gtctgctgctggatgg

SEQ ID NO: 42236 - DNA, 15 bp, Homo sapiens
  source 1..15: mol_type = genomic DNA
gcctgctgctgatgc

SEQ ID NO: 42237 - DNA, 13 bp, Homo sapiens
  source 1..13: mol_type = genomic DNA
caagccggggact

SEQ ID NO: 42238 - DNA, 16 bp, Homo sapiens
  source 1..16: mol_type = genomic DNA
gcccgggaggagcaga

SEQ ID NO: 42239 - DNA, 15 bp, Homo sapiens
  source 1..15: mol_type = genomic DNA
gagagccggcccagc

SEQ ID NO: 42240 - DNA, 17 bp, Homo sapiens
  source 1..17: mol_type = genomic DNA
tacctcttctgtcttta

SEQ ID NO: 42241 - DNA, 15 bp, Homo sapiens
  source 1..15: mol_type = genomic DNA
ccaccttccgaagct

SEQ ID NO: 42242 - DNA, 15 bp, Homo sapiens
  source 1..15: mol_type = genomic DNA
caccttccgaagctc

SEQ ID NO: 42243 - DNA, 15 bp, Homo sapiens
  source 1..15: mol_type = genomic DNA
gcccgggaggggtgg

SEQ ID NO: 42244 - DNA, 16 bp, Homo sapiens
  source 1..16: mol_type = genomic DNA
ccaccttccgaagctc

SEQ ID NO: 42245 - DNA, 19 bp, Homo sapiens
  source 1..19: mol_type = genomic DNA
ccaccttccgaagctcctg

SEQ ID NO: 42246 - DNA, 18 bp, Homo sapiens
  source 1..18: mol_type = genomic DNA
ctcctgtccaccagccct

SEQ ID NO: 42247 - DNA, 17 bp, Homo sapiens
  source 1..17: mol_type = genomic DNA
ctgcctctccatcacca

SEQ ID NO: 42248 - DNA, 15 bp, Homo sapiens
  source 1..15: mol_type = genomic DNA
gcctgctgctgggta

SEQ ID NO: 42249 - DNA, 14 bp, Homo sapiens
  source 1..14: mol_type = genomic DNA
ggctcctggtctgc

SEQ ID NO: 42250 - DNA, 16 bp, Homo sapiens
  source 1..16: mol_type = genomic DNA
cgccgcggagaaccgc

SEQ ID NO: 42251 - DNA, 14 bp, Homo sapiens
  source 1..14: mol_type = genomic DNA
ggctgggattccta

SEQ ID NO: 42252 - DNA, 16 bp, Homo sapiens
  source 1..16: mol_type = genomic DNA
gcccaggaggagctgg

SEQ ID NO: 42253 - DNA, 18 bp, Homo sapiens
  source 1..18: mol_type = genomic DNA
tgctggaggagcatcagg

SEQ ID NO: 42254 - DNA, 18 bp, Homo sapiens
  source 1..18: mol_type = genomic DNA
ccctctctgagcccttgt

SEQ ID NO: 42255 - DNA, 16 bp, Homo sapiens
  source 1..16: mol_type = genomic DNA
gacctggaggagctgg

SEQ ID NO: 42256 - DNA, 19 bp, Homo sapiens
  source 1..19: mol_type = genomic DNA
ctgcctctcccccatccta

SEQ ID NO: 42257 - DNA, 16 bp, Homo sapiens
  source 1..16: mol_type = genomic DNA
gccctggaggagctgt

SEQ ID NO: 42258 - DNA, 15 bp, Homo sapiens
  source 1..15: mol_type = genomic DNA
ggggatcccagaaca

SEQ ID NO: 42259 - DNA, 14 bp, Homo sapiens
  source 1..14: mol_type = genomic DNA
ggcgccctggacgc

SEQ ID NO: 42260 - DNA, 16 bp, Homo sapiens
  source 1..16: mol_type = genomic DNA
gcctgctgctgggtgt

SEQ ID NO: 42261 - DNA, 14 bp, Homo sapiens
  source 1..14: mol_type = genomic DNA
gggccctggtcttc

SEQ ID NO: 42262 - DNA, 15 bp, Homo sapiens
  source 1..15: mol_type = genomic DNA
ctcctgggattcctg

SEQ ID NO: 42263 - DNA, 15 bp, Homo sapiens
  source 1..15: mol_type = genomic DNA
gcctccctggtctgc

SEQ ID NO: 42264 - DNA, 15 bp, Homo sapiens
  source 1..15: mol_type = genomic DNA
tgggatcccagggcc

SEQ ID NO: 42265 - DNA, 17 bp, Homo sapiens
  source 1..17: mol_type = genomic DNA
ggctggcgaggaggggc

SEQ ID NO: 42266 - DNA, 16 bp, Homo sapiens
  source 1..16: mol_type = genomic DNA
aactcgtttggaccct

SEQ ID NO: 42267 - DNA, 16 bp, Homo sapiens
  source 1..16: mol_type = genomic DNA
gaccaggaggagctgg

SEQ ID NO: 42268 - DNA, 16 bp, Homo sapiens
  source 1..16: mol_type = genomic DNA
gaactcgtttggaccc

SEQ ID NO: 42269 - DNA, 17 bp, Homo sapiens
  source 1..17: mol_type = genomic DNA
ccagagaacggtggcac

SEQ ID NO: 42270 - DNA, 14 bp, Homo sapiens
  source 1..14: mol_type = genomic DNA
tgggatcccaggcc

SEQ ID NO: 42271 - DNA, 16 bp, Homo sapiens
  source 1..16: mol_type = genomic DNA
gccagggaggagctgg

SEQ ID NO: 42272 - DNA, 14 bp, Homo sapiens
  source 1..14: mol_type = genomic DNA
ccagaccgccggct

SEQ ID NO: 42273 - DNA, 14 bp, Homo sapiens
  source 1..14: mol_type = genomic DNA
ccctctttcctggg

SEQ ID NO: 42274 - DNA, 14 bp, Homo sapiens
  source 1..14: mol_type = genomic DNA
gatgccctcccgaa

SEQ ID NO: 42275 - DNA, 17 bp, Homo sapiens
  source 1..17: mol_type = genomic DNA
ctgggtccctgccttct

SEQ ID NO: 42276 - DNA, 17 bp, Homo sapiens
  source 1..17: mol_type = genomic DNA
tgtgatgagtctgagat

SEQ ID NO: 42277 - DNA, 15 bp, Homo sapiens
  source 1..15: mol_type = genomic DNA
caagccggggcagct

SEQ ID NO: 42278 - DNA, 15 bp, Homo sapiens
  source 1..15: mol_type = genomic DNA
ggcgccctggtctgc

SEQ ID NO: 42279 - DNA, 15 bp, Homo sapiens
  source 1..15: mol_type = genomic DNA
acacctggctggcta

SEQ ID NO: 42280 - DNA, 15 bp, Homo sapiens
  source 1..15: mol_type = genomic DNA
ggcctgggattcctg

SEQ ID NO: 42281 - DNA, 15 bp, Homo sapiens
  source 1..15: mol_type = genomic DNA
ccattctttcctggg

SEQ ID NO: 42282 - DNA, 15 bp, Homo sapiens
  source 1..15: mol_type = genomic DNA
ggggatcccagagcc

SEQ ID NO: 42283 - DNA, 15 bp, Homo sapiens
  source 1..15: mol_type = genomic DNA
cagagccggcccagg

SEQ ID NO: 42284 - DNA, 16 bp, Homo sapiens
  source 1..16: mol_type = genomic DNA
gcctgctgctggatga

SEQ ID NO: 42285 - DNA, 16 bp, Homo sapiens
  source 1..16: mol_type = genomic DNA
ccggagtttctgcagc

SEQ ID NO: 42286 - DNA, 16 bp, Homo sapiens
  source 1..16: mol_type = genomic DNA
tctttcgcggggaaca

SEQ ID NO: 42287 - DNA, 16 bp, Homo sapiens
  source 1..16: mol_type = genomic DNA
aacacctggctggcta

SEQ ID NO: 42288 - DNA, 16 bp, Homo sapiens
  source 1..16: mol_type = genomic DNA
cggcctgggattcctg

SEQ ID NO: 42289 - DNA, 16 bp, Homo sapiens
  source 1..16: mol_type = genomic DNA
actccacaccgcggag

SEQ ID NO: 42290 - DNA, 16 bp, Homo sapiens
  source 1..16: mol_type = genomic DNA
caccgcggagaactgc

SEQ ID NO: 42291 - DNA, 16 bp, Homo sapiens
  source 1..16: mol_type = genomic DNA
cggggatcccagagcc

SEQ ID NO: 42292 - DNA, 17 bp, Homo sapiens
  source 1..17: mol_type = genomic DNA
cagatgcaaggcatccc

SEQ ID NO: 42293 - DNA, 17 bp, Homo sapiens
  source 1..17: mol_type = genomic DNA
ctggaggagctttagga

SEQ ID NO: 42294 - DNA, 17 bp, Homo sapiens
  source 1..17: mol_type = genomic DNA
tggaggagctttaggac

SEQ ID NO: 42295 - DNA, 17 bp, Homo sapiens
  source 1..17: mol_type = genomic DNA
gggcgtgtctccgcccc

SEQ ID NO: 42296 - DNA, 18 bp, Homo sapiens
  source 1..18: mol_type = genomic DNA
cccgggggagctggaggc

SEQ ID NO: 42297 - DNA, 17 bp, Homo sapiens
  source 1..17: mol_type = genomic DNA
cggaagaggcgcctcgc

SEQ ID NO: 42298 - DNA, 18 bp, Homo sapiens
  source 1..18: mol_type = genomic DNA
ctcgctggaagcacccct

SEQ ID NO: 42299 - DNA, 18 bp, Homo sapiens
  source 1..18: mol_type = genomic DNA
cccctcagcgaggaagaa

SEQ ID NO: 42300 - DNA, 18 bp, Homo sapiens
  source 1..18: mol_type = genomic DNA
cagcgaggaagaataccg

SEQ ID NO: 42301 - DNA, 18 bp, Homo sapiens
  source 1..18: mol_type = genomic DNA
ccgggctctgctggagga

SEQ ID NO: 42302 - DNA, 18 bp, Homo sapiens
  source 1..18: mol_type = genomic DNA
tgctggaggagctttagg

SEQ ID NO: 42303 - DNA, 18 bp, Homo sapiens
  source 1..18: mol_type = genomic DNA
ggcggtggcctctctttc

SEQ ID NO: 42304 - DNA, 18 bp, Homo sapiens
  source 1..18: mol_type = genomic DNA
gaacacctggctggctac

SEQ ID NO: 42305 - DNA, 18 bp, Homo sapiens
  source 1..18: mol_type = genomic DNA
ggctggctacggaggggc

SEQ ID NO: 42306 - DNA, 18 bp, Homo sapiens
  source 1..18: mol_type = genomic DNA
ccggcctgggattcctgc

SEQ ID NO: 42307 - DNA, 18 bp, Homo sapiens
  source 1..18: mol_type = genomic DNA
ctgggattcctgccttct

SEQ ID NO: 42308 - DNA, 17 bp, Homo sapiens
  source 1..17: mol_type = genomic DNA
ggccggtgagagactcc

SEQ ID NO: 42309 - DNA, 18 bp, Homo sapiens
  source 1..18: mol_type = genomic DNA
cccggggatcccagagcc

SEQ ID NO: 42310 - DNA, 18 bp, Homo sapiens
  source 1..18: mol_type = genomic DNA
ccggggatcccagagccg

SEQ ID NO: 42311 - DNA, 18 bp, Homo sapiens
  source 1..18: mol_type = genomic DNA
tcccagagccggcccagg

SEQ ID NO: 42312 - DNA, 18 bp, Homo sapiens
  source 1..18: mol_type = genomic DNA
ccggcccaggtaccagca

SEQ ID NO: 42313 - DNA, 19 bp, Homo sapiens
  source 1..19: mol_type = genomic DNA
ctgcctctccaccagccca

SEQ ID NO: 42314 - DNA, 20 bp, Homo sapiens
  source 1..20: mol_type = genomic DNA
ggaacacctggctggctacg

SEQ ID NO: 42315 - DNA, 20 bp, Homo sapiens
  source 1..20: mol_type = genomic DNA
gcctgggattcctgccttct

SEQ ID NO: 42316 - DNA, 20 bp, Homo sapiens
  source 1..20: mol_type = genomic DNA
tcccggggatcccagagccg

SEQ ID NO: 42317 - DNA, 14 bp, Homo sapiens
  source 1..14: mol_type = genomic DNA
ggactgcaagggag

SEQ ID NO: 42318 - DNA, 15 bp, Homo sapiens
  source 1..15: mol_type = genomic DNA
ggcctgggatacctt

SEQ ID NO: 42319 - DNA, 16 bp, Homo sapiens
  source 1..16: mol_type = genomic DNA
actgagtttctgcagc

SEQ ID NO: 42320 - DNA, 18 bp, Homo sapiens
  source 1..18: mol_type = genomic DNA
gtgcctctccaccaccga

SEQ ID NO: 42321 - DNA, 15 bp, Homo sapiens
  source 1..15: mol_type = genomic DNA
tcctgtgctggatga

SEQ ID NO: 42322 - DNA, 14 bp, Homo sapiens
  source 1..14: mol_type = genomic DNA
ggcctgggattctg

SEQ ID NO: 42323 - DNA, 15 bp, Homo sapiens
  source 1..15: mol_type = genomic DNA
aggcctgggattctg

SEQ ID NO: 42324 - DNA, 15 bp, Homo sapiens
  source 1..15: mol_type = genomic DNA
cagtcaaggcatccc

SEQ ID NO: 42325 - DNA, 14 bp, Homo sapiens
  source 1..14: mol_type = genomic DNA
accctggctggctc

SEQ ID NO: 42326 - DNA, 15 bp, Homo sapiens
  source 1..15: mol_type = genomic DNA
acaactggctggctt

SEQ ID NO: 42327 - DNA, 14 bp, Homo sapiens
  source 1..14: mol_type = genomic DNA
ggcctgggattcag

SEQ ID NO: 42328 - DNA, 15 bp, Homo sapiens
  source 1..15: mol_type = genomic DNA
attcggctgaatgtc

SEQ ID NO: 42329 - DNA, 17 bp, Homo sapiens
  source 1..17: mol_type = genomic DNA
cggagctcgcggcctct

SEQ ID NO: 42330 - DNA, 17 bp, Homo sapiens
  source 1..17: mol_type = genomic DNA
agctcgcggcctctttg

SEQ ID NO: 42331 - DNA, 15 bp, Homo sapiens
  source 1..15: mol_type = genomic DNA
atctggtttcagaac

SEQ ID NO: 42332 - DNA, 14 bp, Homo sapiens
  source 1..14: mol_type = genomic DNA
ccaccttccgtcct

SEQ ID NO: 42333 - DNA, 18 bp, Homo sapiens
  source 1..18: mol_type = genomic DNA
ccaccttcaagctgtctt

SEQ ID NO: 42334 - DNA, 15 bp, Homo sapiens
  source 1..15: mol_type = genomic DNA
ggggatcccagggcc

SEQ ID NO: 42335 - DNA, 16 bp, Homo sapiens
  source 1..16: mol_type = genomic DNA
tggggatcccagggcc

SEQ ID NO: 42336 - DNA, 16 bp, Homo sapiens
  source 1..16: mol_type = genomic DNA
tggaggagctttaaac

SEQ ID NO: 42337 - DNA, 14 bp, Homo sapiens
  source 1..14: mol_type = genomic DNA
cgcctgggattctg

SEQ ID NO: 42338 - DNA, 14 bp, Homo sapiens
  source 1..14: mol_type = genomic DNA
cgcctgggattctg

SEQ ID NO: 42339 - DNA, 18 bp, Homo sapiens
  source 1..18: mol_type = genomic DNA
ccacacctacgctgtcta

SEQ ID NO: 42340 - DNA, 18 bp, Homo sapiens
  source 1..18: mol_type = genomic DNA
agctcactggcctctcag

SEQ ID NO: 42341 - DNA, 16 bp, Homo sapiens
  source 1..16: mol_type = genomic DNA
ccggccggggctcagc

SEQ ID NO: 42342 - DNA, 17 bp, Homo sapiens
  source 1..17: mol_type = genomic DNA
ctcgctggaagccccct

SEQ ID NO: 42343 - DNA, 15 bp, Homo sapiens
  source 1..15: mol_type = genomic DNA
caccgcggagaacgc

SEQ ID NO: 42344 - DNA, 15 bp, Homo sapiens
  source 1..15: mol_type = genomic DNA
tcttcctttcctggg

SEQ ID NO: 42345 - DNA, 15 bp, Homo sapiens
  source 1..15: mol_type = genomic DNA
gcctggaggagctgg

SEQ ID NO: 42346 - DNA, 14 bp, Homo sapiens
  source 1..14: mol_type = genomic DNA
cgcgccctggttgc

SEQ ID NO: 42347 - DNA, 14 bp, Homo sapiens
  source 1..14: mol_type = genomic DNA
ggcgccctggctgc

SEQ ID NO: 42348 - DNA, 18 bp, Homo sapiens
  source 1..18: mol_type = genomic DNA
cctgggggagctggaggc

SEQ ID NO: 42349 - DNA, 16 bp, Homo sapiens
  source 1..16: mol_type = genomic DNA
cagtgcaaggcatcac

SEQ ID NO: 42350 - DNA, 16 bp, Homo sapiens
  source 1..16: mol_type = genomic DNA
ccggcccaggtcagca

SEQ ID NO: 42351 - DNA, 14 bp, Homo sapiens
  source 1..14: mol_type = genomic DNA
ggggatcccaagca

SEQ ID NO: 42352 - DNA, 14 bp, Homo sapiens
  source 1..14: mol_type = genomic DNA
gctgctgctggaga

SEQ ID NO: 42353 - DNA, 15 bp, Homo sapiens
  source 1..15: mol_type = genomic DNA
gcccgggaggagcgg

SEQ ID NO: 42354 - DNA, 15 bp, Homo sapiens
  source 1..15: mol_type = genomic DNA
ccttgctttcctggg

SEQ ID NO: 42355 - DNA, 15 bp, Homo sapiens
  source 1..15: mol_type = genomic DNA
ggcgccctggactcc

SEQ ID NO: 42356 - DNA, 17 bp, Homo sapiens
  source 1..17: mol_type = genomic DNA
ctccctccaccagctca

SEQ ID NO: 42357 - DNA, 15 bp, Homo sapiens
  source 1..15: mol_type = genomic DNA
tccgccagctgaagc

SEQ ID NO: 42358 - DNA, 15 bp, Homo sapiens
  source 1..15: mol_type = genomic DNA
acacctggctgggta

SEQ ID NO: 42359 - DNA, 16 bp, Homo sapiens
  source 1..16: mol_type = genomic DNA
aacacctggctgggta

SEQ ID NO: 42360 - DNA, 14 bp, Homo sapiens
  source 1..14: mol_type = genomic DNA
ggcgccctggcagc

SEQ ID NO: 42361 - DNA, 15 bp, Homo sapiens
  source 1..15: mol_type = genomic DNA
ccgggccggcccagg

SEQ ID NO: 42362 - DNA, 15 bp, Homo sapiens
  source 1..15: mol_type = genomic DNA
gctgctgctggctga

SEQ ID NO: 42363 - DNA, 14 bp, Homo sapiens
  source 1..14: mol_type = genomic DNA
cgagccggcccggg

SEQ ID NO: 42364 - DNA, 15 bp, Homo sapiens
  source 1..15: mol_type = genomic DNA
ggcgccctggtttgt

SEQ ID NO: 42365 - DNA, 14 bp, Homo sapiens
  source 1..14: mol_type = genomic DNA
gctgctgctggata

SEQ ID NO: 42366 - DNA, 14 bp, Homo sapiens
  source 1..14: mol_type = genomic DNA
ccacctggctggca

SEQ ID NO: 42367 - DNA, 15 bp, Homo sapiens
  source 1..15: mol_type = genomic DNA
ccaggcggggcagct

SEQ ID NO: 42368 - DNA, 15 bp, Homo sapiens
  source 1..15: mol_type = genomic DNA
gattcagatggtttc

SEQ ID NO: 42369 - DNA, 16 bp, Homo sapiens
  source 1..16: mol_type = genomic DNA
gctctggaggagctgg

SEQ ID NO: 42370 - DNA, 16 bp, Homo sapiens
  source 1..16: mol_type = genomic DNA
agaaacgctggcccag

SEQ ID NO: 42371 - DNA, 17 bp, Homo sapiens
  source 1..17: mol_type = genomic DNA
agctcgcgggctctctg

SEQ ID NO: 42372 - DNA, 14 bp, Homo sapiens
  source 1..14: mol_type = genomic DNA
caggcggggcagct

SEQ ID NO: 42373 - DNA, 14 bp, Homo sapiens
  source 1..14: mol_type = genomic DNA
agtgcagagattgc

SEQ ID NO: 42374 - DNA, 14 bp, Homo sapiens
  source 1..14: mol_type = genomic DNA
cctgctttcctggg

SEQ ID NO: 42375 - DNA, 13 bp, Homo sapiens
  source 1..13: mol_type = genomic DNA
ccgccgccctgct

SEQ ID NO: 42376 - DNA, 13 bp, Homo sapiens
  source 1..13: mol_type = genomic DNA
ggcgccctggtgc

SEQ ID NO: 42377 - DNA, 15 bp, Homo sapiens
  source 1..15: mol_type = genomic DNA
gcggatcccagagcc

SEQ ID NO: 42378 - DNA, 14 bp, Homo sapiens
  source 1..14: mol_type = genomic DNA
caagccggcccagc

SEQ ID NO: 42379 - DNA, 16 bp, Homo sapiens
  source 1..16: mol_type = genomic DNA
ggcggatcccagagcc

SEQ ID NO: 42380 - DNA, 13 bp, Homo sapiens
  source 1..13: mol_type = genomic DNA
cggaagggagctc

SEQ ID NO: 42381 - DNA, 14 bp, Homo sapiens
  source 1..14: mol_type = genomic DNA
cccgccgccctgct

SEQ ID NO: 42382 - DNA, 15 bp, Homo sapiens
  source 1..15: mol_type = genomic DNA
caagccggggcaggt

SEQ ID NO: 42383 - DNA, 13 bp, Homo sapiens
  source 1..13: mol_type = genomic DNA
ctgcaagggagcc

SEQ ID NO: 42384 - DNA, 16 bp, Homo sapiens
  source 1..16: mol_type = genomic DNA
gcccgggaggagctga

SEQ ID NO: 42385 - DNA, 14 bp, Homo sapiens
  source 1..14: mol_type = genomic DNA
cggggatcccggcc

SEQ ID NO: 42386 - DNA, 16 bp, Homo sapiens
  source 1..16: mol_type = genomic DNA
ccggcctgattcctgc

SEQ ID NO: 42387 - DNA, 14 bp, Homo sapiens
  source 1..14: mol_type = genomic DNA
cgtgcaaggggcac

SEQ ID NO: 42388 - DNA, 15 bp, Homo sapiens
  source 1..15: mol_type = genomic DNA
acgtgcaaggggcac

SEQ ID NO: 42389 - DNA, 13 bp, Homo sapiens
  source 1..13: mol_type = genomic DNA
ggcctgggatttg

SEQ ID NO: 42390 - DNA, 15 bp, Homo sapiens
  source 1..15: mol_type = genomic DNA
gggcagggcgctcgc

SEQ ID NO: 42391 - DNA, 13 bp, Homo sapiens
  source 1..13: mol_type = genomic DNA
caagccgggggct

SEQ ID NO: 42392 - DNA, 16 bp, Homo sapiens
  source 1..16: mol_type = genomic DNA
tcactgtggatcctaa

SEQ ID NO: 42393 - DNA, 14 bp, Homo sapiens
  source 1..14: mol_type = genomic DNA
caaccggggcagca

SEQ ID NO: 42394 - DNA, 17 bp, Homo sapiens
  source 1..17: mol_type = genomic DNA
atggccctcccaagacc

SEQ ID NO: 42395 - DNA, 17 bp, Homo sapiens
  source 1..17: mol_type = genomic DNA
gagctgcaaggcatccc

SEQ ID NO: 42396 - DNA, 14 bp, Homo sapiens
  source 1..14: mol_type = genomic DNA
caagccggggcacg

SEQ ID NO: 42397 - DNA, 15 bp, Homo sapiens
  source 1..15: mol_type = genomic DNA
ggcgccctggtgtgc

SEQ ID NO: 42398 - DNA, 14 bp, Homo sapiens
  source 1..14: mol_type = genomic DNA
caagccggcccaag

SEQ ID NO: 42399 - DNA, 15 bp, Homo sapiens
  source 1..15: mol_type = genomic DNA
gagggtcccagagcc

SEQ ID NO: 42400 - DNA, 16 bp, Homo sapiens
  source 1..16: mol_type = genomic DNA
cattcagattggtttc

SEQ ID NO: 42401 - DNA, 16 bp, Homo sapiens
  source 1..16: mol_type = genomic DNA
tttctggctgaatgcc

SEQ ID NO: 42402 - DNA, 14 bp, Homo sapiens
  source 1..14: mol_type = genomic DNA
ccggccggggcccc

SEQ ID NO: 42403 - DNA, 14 bp, Homo sapiens
  source 1..14: mol_type = genomic DNA
ccacctggctggca

SEQ ID NO: 42404 - DNA, 14 bp, Homo sapiens
  source 1..14: mol_type = genomic DNA
ccggccggggcacc

SEQ ID NO: 42405 - DNA, 15 bp, Homo sapiens
  source 1..15: mol_type = genomic DNA
caagccggggcagct

SEQ ID NO: 42406 - DNA, 16 bp, Homo sapiens
  source 1..16: mol_type = genomic DNA
gtggcagggctccggc

SEQ ID NO: 42407 - DNA, 13 bp, Homo sapiens
  source 1..13: mol_type = genomic DNA
acacctggctgga

SEQ ID NO: 42408 - DNA, 13 bp, Homo sapiens
  source 1..13: mol_type = genomic DNA
acacctggctgca

SEQ ID NO: 42409 - DNA, 15 bp, Homo sapiens
  source 1..15: mol_type = genomic DNA
tgcagagaatgtcac

SEQ ID NO: 42410 - DNA, 17 bp, Homo sapiens
  source 1..17: mol_type = genomic DNA
tgcagagaatgtcacag

SEQ ID NO: 42411 - DNA, 15 bp, Homo sapiens
  source 1..15: mol_type = genomic DNA
ggcgccctggactcc

SEQ ID NO: 42412 - DNA, 16 bp, Homo sapiens
  source 1..16: mol_type = genomic DNA
tccctgtgtatcctat

SEQ ID NO: 42413 - DNA, 16 bp, Homo sapiens
  source 1..16: mol_type = genomic DNA
ccctgctgctggatgg

SEQ ID NO: 42414 - DNA, 15 bp, Homo sapiens
  source 1..15: mol_type = genomic DNA
gccgacctggtctgc

SEQ ID NO: 42415 - DNA, 14 bp, Homo sapiens
  source 1..14: mol_type = genomic DNA
atactggctggcta

SEQ ID NO: 42416 - DNA, 15 bp, Homo sapiens
  source 1..15: mol_type = genomic DNA
gcacctggctggcaa

SEQ ID NO: 42417 - DNA, 14 bp, Homo sapiens
  source 1..14: mol_type = genomic DNA
caagccggggagcc

SEQ ID NO: 42418 - DNA, 16 bp, Homo sapiens
  source 1..16: mol_type = genomic DNA
caagggcaggcacccg

SEQ ID NO: 42419 - DNA, 17 bp, Homo sapiens
  source 1..17: mol_type = genomic DNA
ccaccttgagctgtctc

SEQ ID NO: 42420 - DNA, 15 bp, Homo sapiens
  source 1..15: mol_type = genomic DNA
ccaccttccgaggcc

SEQ ID NO: 42421 - DNA, 18 bp, Homo sapiens
  source 1..18: mol_type = genomic DNA
tcggcctaggattcctgc

SEQ ID NO: 42422 - DNA, 13 bp, Homo sapiens
  source 1..13: mol_type = genomic DNA
ccaccgccctgct

SEQ ID NO: 42423 - DNA, 15 bp, Homo sapiens
  source 1..15: mol_type = genomic DNA
actccactccgagag

SEQ ID NO: 42424 - DNA, 15 bp, Homo sapiens
  source 1..15: mol_type = genomic DNA
agcgccctggtcggc

SEQ ID NO: 42425 - DNA, 16 bp, Homo sapiens
  source 1..16: mol_type = genomic DNA
cggagatcccagagac

SEQ ID NO: 42426 - DNA, 15 bp, Homo sapiens
  source 1..15: mol_type = genomic DNA
gtggagggcgcccgg

SEQ ID NO: 42427 - DNA, 14 bp, Homo sapiens
  source 1..14: mol_type = genomic DNA
tccgccagctgagc

SEQ ID NO: 42428 - DNA, 14 bp, Homo sapiens
  source 1..14: mol_type = genomic DNA
gcccttccgacgct

SEQ ID NO: 42429 - DNA, 14 bp, Homo sapiens
  source 1..14: mol_type = genomic DNA
cccttccgacgcta

SEQ ID NO: 42430 - DNA, 16 bp, Homo sapiens
  source 1..16: mol_type = genomic DNA
ctgggaagctttagga

SEQ ID NO: 42431 - DNA, 16 bp, Homo sapiens
  source 1..16: mol_type = genomic DNA
tgggaagctttaggac

SEQ ID NO: 42432 - DNA, 15 bp, Homo sapiens
  source 1..15: mol_type = genomic DNA
tcactgtggatccat

SEQ ID NO: 42433 - DNA, 15 bp, Homo sapiens
  source 1..15: mol_type = genomic DNA
ccagaccgccgtgcg

SEQ ID NO: 42434 - DNA, 19 bp, Homo sapiens
  source 1..19: mol_type = genomic DNA
ctccctctccaccagcgca

SEQ ID NO: 42435 - DNA, 14 bp, Homo sapiens
  source 1..14: mol_type = genomic DNA
aggccctggtctgc

SEQ ID NO: 42436 - DNA, 15 bp, Homo sapiens
  source 1..15: mol_type = genomic DNA
gtcctgggattcctg

SEQ ID NO: 42437 - DNA, 16 bp, Homo sapiens
  source 1..16: mol_type = genomic DNA
tgtcctgggattcctg

SEQ ID NO: 42438 - DNA, 14 bp, Homo sapiens
  source 1..14: mol_type = genomic DNA
gacgtttggacccc

SEQ ID NO: 42439 - DNA, 15 bp, Homo sapiens
  source 1..15: mol_type = genomic DNA
ccacccggggcagct

SEQ ID NO: 42440 - DNA, 15 bp, Homo sapiens
  source 1..15: mol_type = genomic DNA
ggagccctggtctcc

SEQ ID NO: 42441 - DNA, 17 bp, Homo sapiens
  source 1..17: mol_type = genomic DNA
tcctctttctgtctttg

SEQ ID NO: 42442 - DNA, 14 bp, Homo sapiens
  source 1..14: mol_type = genomic DNA
aaacctggctggca

SEQ ID NO: 42443 - DNA, 15 bp, Homo sapiens
  source 1..15: mol_type = genomic DNA
aaaacctggctggca

SEQ ID NO: 42444 - DNA, 14 bp, Homo sapiens
  source 1..14: mol_type = genomic DNA
ggacgtgcaagggg

SEQ ID NO: 42445 - DNA, 14 bp, Homo sapiens
  source 1..14: mol_type = genomic DNA
cgtgcaaggggcgc

SEQ ID NO: 42446 - DNA, 15 bp, Homo sapiens
  source 1..15: mol_type = genomic DNA
ggacgtgcaaggggc

SEQ ID NO: 42447 - DNA, 15 bp, Homo sapiens
  source 1..15: mol_type = genomic DNA
gacgtgcaaggggcg

SEQ ID NO: 42448 - DNA, 15 bp, Homo sapiens
  source 1..15: mol_type = genomic DNA
acgtgcaaggggcgc

SEQ ID NO: 42449 - DNA, 14 bp, Homo sapiens
  source 1..14: mol_type = genomic DNA
cgagccggcccggg

SEQ ID NO: 42450 - DNA, 15 bp, Homo sapiens
  source 1..15: mol_type = genomic DNA
gttctggctgaagtc

SEQ ID NO: 42451 - DNA, 18 bp, Homo sapiens
  source 1..18: mol_type = genomic DNA
ctccactgcaccagccca

SEQ ID NO: 42452 - DNA, 15 bp, Homo sapiens
  source 1..15: mol_type = genomic DNA
cgggatcccagagct

SEQ ID NO: 42453 - DNA, 16 bp, Homo sapiens
  source 1..16: mol_type = genomic DNA
ccgggatcccagagct

SEQ ID NO: 42454 - DNA, 17 bp, Homo sapiens
  source 1..17: mol_type = genomic DNA
cccgggatcccagagct

SEQ ID NO: 42455 - DNA, 15 bp, Homo sapiens
  source 1..15: mol_type = genomic DNA
gccaggaggagctgg

SEQ ID NO: 42456 - DNA, 16 bp, Homo sapiens
  source 1..16: mol_type = genomic DNA
ctgcctctccaccaca

SEQ ID NO: 42457 - DNA, 16 bp, Homo sapiens
  source 1..16: mol_type = genomic DNA
cacaatatcccctgtg

SEQ ID NO: 42458 - DNA, 15 bp, Homo sapiens
  source 1..15: mol_type = genomic DNA
aaagccggggcagca

SEQ ID NO: 42459 - DNA, 14 bp, Homo sapiens
  source 1..14: mol_type = genomic DNA
ggcctgggattctg

SEQ ID NO: 42460 - DNA, 15 bp, Homo sapiens
  source 1..15: mol_type = genomic DNA
tggcctgggattctg

SEQ ID NO: 42461 - DNA, 14 bp, Homo sapiens
  source 1..14: mol_type = genomic DNA
ggggatcccaaacc

SEQ ID NO: 42462 - DNA, 13 bp, Homo sapiens
  source 1..13: mol_type = genomic DNA
ccaccttccgcct

SEQ ID NO: 42463 - DNA, 16 bp, Homo sapiens
  source 1..16: mol_type = genomic DNA
gcccgggaggtgctgg

SEQ ID NO: 42464 - DNA, 16 bp, Homo sapiens
  source 1..16: mol_type = genomic DNA
gtggcagggcgcgcgc

SEQ ID NO: 42465 - DNA, 16 bp, Homo sapiens
  source 1..16: mol_type = genomic DNA
ggccgggaggagccgg

SEQ ID NO: 42466 - DNA, 15 bp, Homo sapiens
  source 1..15: mol_type = genomic DNA
gtctgtttggacccc

SEQ ID NO: 42467 - DNA, 16 bp, Homo sapiens
  source 1..16: mol_type = genomic DNA
ctggaggagctgagga

SEQ ID NO: 42468 - DNA, 17 bp, Homo sapiens
  source 1..17: mol_type = genomic DNA
gaagggccaggcagcag

SEQ ID NO: 42469 - DNA, 14 bp, Homo sapiens
  source 1..14: mol_type = genomic DNA
ccgcggggctcacc

SEQ ID NO: 42470 - DNA, 16 bp, Homo sapiens
  source 1..16: mol_type = genomic DNA
gtcctggaggagctgg

SEQ ID NO: 42471 - DNA, 15 bp, Homo sapiens
  source 1..15: mol_type = genomic DNA
ccggccggggccccc

SEQ ID NO: 42472 - DNA, 18 bp, Homo sapiens
  source 1..18: mol_type = genomic DNA
cccggtggagctggagga

SEQ ID NO: 42473 - DNA, 15 bp, Homo sapiens
  source 1..15: mol_type = genomic DNA
ggcgccctgggcggc

SEQ ID NO: 42474 - DNA, 15 bp, Homo sapiens
  source 1..15: mol_type = genomic DNA
ggtgctcccagagcc

SEQ ID NO: 42475 - DNA, 15 bp, Homo sapiens
  source 1..15: mol_type = genomic DNA
ggcgccctggttttc

SEQ ID NO: 42476 - DNA, 16 bp, Homo sapiens
  source 1..16: mol_type = genomic DNA
gtccaggaggagctgg

SEQ ID NO: 42477 - DNA, 15 bp, Homo sapiens
  source 1..15: mol_type = genomic DNA
cagagccggctcaga

SEQ ID NO: 42478 - DNA, 17 bp, Homo sapiens
  source 1..17: mol_type = genomic DNA
ctgcctctccccaccct

SEQ ID NO: 42479 - DNA, 14 bp, Homo sapiens
  source 1..14: mol_type = genomic DNA
gctgctgctggaga

SEQ ID NO: 42480 - DNA, 16 bp, Homo sapiens
  source 1..16: mol_type = genomic DNA
gcctgctgctggatga

SEQ ID NO: 42481 - DNA, 16 bp, Homo sapiens
  source 1..16: mol_type = genomic DNA
ccctgctgctggatga

SEQ ID NO: 42482 - DNA, 16 bp, Homo sapiens
  source 1..16: mol_type = genomic DNA
gaaggccctcccggca

SEQ ID NO: 42483 - DNA, 17 bp, Homo sapiens
  source 1..17: mol_type = genomic DNA
aaggccctcccggcacc

SEQ ID NO: 42484 - DNA, 15 bp, Homo sapiens
  source 1..15: mol_type = genomic DNA
gggaatcccagagcc

SEQ ID NO: 42485 - DNA, 15 bp, Homo sapiens
  source 1..15: mol_type = genomic DNA
gcctgctgtggatga

SEQ ID NO: 42486 - DNA, 16 bp, Homo sapiens
  source 1..16: mol_type = genomic DNA
ggggaatcccagagcc

SEQ ID NO: 42487 - DNA, 15 bp, Homo sapiens
  source 1..15: mol_type = genomic DNA
tgtgcagaatatgtc

SEQ ID NO: 42488 - DNA, 15 bp, Homo sapiens
  source 1..15: mol_type = genomic DNA
tctttctttccttgg

SEQ ID NO: 42489 - DNA, 16 bp, Homo sapiens
  source 1..16: mol_type = genomic DNA
gccggggaggagctgg

SEQ ID NO: 42490 - DNA, 18 bp, Homo sapiens
  source 1..18: mol_type = genomic DNA
gaacacccggctggccac

SEQ ID NO: 42491 - DNA, 14 bp, Homo sapiens
  source 1..14: mol_type = genomic DNA
gccgggaggagcgg

SEQ ID NO: 42492 - DNA, 16 bp, Homo sapiens
  source 1..16: mol_type = genomic DNA
cctcccttggatcctt

SEQ ID NO: 42493 - DNA, 14 bp, Homo sapiens
  source 1..14: mol_type = genomic DNA
gctgctgctggtga

SEQ ID NO: 42494 - DNA, 14 bp, Homo sapiens
  source 1..14: mol_type = genomic DNA
aggcaagggagctc

SEQ ID NO: 42495 - DNA, 15 bp, Homo sapiens
  source 1..15: mol_type = genomic DNA
ccaccttccgacccc

SEQ ID NO: 42496 - DNA, 16 bp, Homo sapiens
  source 1..16: mol_type = genomic DNA
caggagccggcccggg

SEQ ID NO: 42497 - DNA, 14 bp, Homo sapiens
  source 1..14: mol_type = genomic DNA
gcagccgccctgct

SEQ ID NO: 42498 - DNA, 16 bp, Homo sapiens
  source 1..16: mol_type = genomic DNA
gccctggaggagctgg

SEQ ID NO: 42499 - DNA, 15 bp, Homo sapiens
  source 1..15: mol_type = genomic DNA
gccctgaggagctgg

SEQ ID NO: 42500 - DNA, 13 bp, Homo sapiens
  source 1..13: mol_type = genomic DNA
ggcgccctggtgc

SEQ ID NO: 42501 - DNA, 18 bp, Homo sapiens
  source 1..18: mol_type = genomic DNA
ctcctctccaccaccccc

SEQ ID NO: 42502 - DNA, 15 bp, Homo sapiens
  source 1..15: mol_type = genomic DNA
tccctgtggaccgat

SEQ ID NO: 42503 - DNA, 15 bp, Homo sapiens
  source 1..15: mol_type = genomic DNA
ggccccctggtctgt

SEQ ID NO: 42504 - DNA, 15 bp, Homo sapiens
  source 1..15: mol_type = genomic DNA
gtggcagggcgccac

SEQ ID NO: 42505 - DNA, 17 bp, Homo sapiens
  source 1..17: mol_type = genomic DNA
ctcctctccacagccca

SEQ ID NO: 42506 - DNA, 15 bp, Homo sapiens
  source 1..15: mol_type = genomic DNA
ctggcggggctcacc

SEQ ID NO: 42507 - DNA, 15 bp, Homo sapiens
  source 1..15: mol_type = genomic DNA
gtggcagggccacgc

SEQ ID NO: 42508 - DNA, 15 bp, Homo sapiens
  source 1..15: mol_type = genomic DNA
attctggctgatgtg

SEQ ID NO: 42509 - DNA, 16 bp, Homo sapiens
  source 1..16: mol_type = genomic DNA
ggagggccaggccccg

SEQ ID NO: 42510 - DNA, 14 bp, Homo sapiens
  source 1..14: mol_type = genomic DNA
tgggatcccaggcc

SEQ ID NO: 42511 - DNA, 15 bp, Homo sapiens
  source 1..15: mol_type = genomic DNA
ctgagccggccccgg

SEQ ID NO: 42512 - DNA, 15 bp, Homo sapiens
  source 1..15: mol_type = genomic DNA
cagagccggcccagc

SEQ ID NO: 42513 - DNA, 18 bp, Homo sapiens
  source 1..18: mol_type = genomic DNA
gcccagagccggcccagc

SEQ ID NO: 42514 - DNA, 15 bp, Homo sapiens
  source 1..15: mol_type = genomic DNA
cacagccggcccagc

SEQ ID NO: 42515 - DNA, 15 bp, Homo sapiens
  source 1..15: mol_type = genomic DNA
gcaggccgccctgct

SEQ ID NO: 42516 - DNA, 14 bp, Homo sapiens
  source 1..14: mol_type = genomic DNA
cgggccggcccagg

SEQ ID NO: 42517 - DNA, 14 bp, Homo sapiens
  source 1..14: mol_type = genomic DNA
cagccggggcagca

SEQ ID NO: 42518 - DNA, 18 bp, Homo sapiens
  source 1..18: mol_type = genomic DNA
tacagtcacatctcctgg

SEQ ID NO: 42519 - DNA, 14 bp, Homo sapiens
  source 1..14: mol_type = genomic DNA
ccggagtttctgcc

SEQ ID NO: 42520 - DNA, 15 bp, Homo sapiens
  source 1..15: mol_type = genomic DNA
ggggatcccataacc

SEQ ID NO: 42521 - DNA, 19 bp, Homo sapiens
  source 1..19: mol_type = genomic DNA
ctgcctctcctccatccaa

SEQ ID NO: 42522 - DNA, 15 bp, Homo sapiens
  source 1..15: mol_type = genomic DNA
gcctgtttggacccc

SEQ ID NO: 42523 - DNA, 14 bp, Homo sapiens
  source 1..14: mol_type = genomic DNA
acacctggctccta

SEQ ID NO: 42524 - DNA, 15 bp, Homo sapiens
  source 1..15: mol_type = genomic DNA
aacacctggctccta

SEQ ID NO: 42525 - DNA, 15 bp, Homo sapiens
  source 1..15: mol_type = genomic DNA
ggggcaagggagctc

SEQ ID NO: 42526 - DNA, 14 bp, Homo sapiens
  source 1..14: mol_type = genomic DNA
aacctggctggctt

SEQ ID NO: 42527 - DNA, 16 bp, Homo sapiens
  source 1..16: mol_type = genomic DNA
gcgctggaggagctgg

SEQ ID NO: 42528 - DNA, 15 bp, Homo sapiens
  source 1..15: mol_type = genomic DNA
ccacctggctggcaa

SEQ ID NO: 42529 - DNA, 15 bp, Homo sapiens
  source 1..15: mol_type = genomic DNA
agggatcccagagtc

SEQ ID NO: 42530 - DNA, 17 bp, Homo sapiens
  source 1..17: mol_type = genomic DNA
ctccctctccaccccca

SEQ ID NO: 42531 - DNA, 14 bp, Homo sapiens
  source 1..14: mol_type = genomic DNA
tcagcagctgaggc

SEQ ID NO: 42532 - DNA, 13 bp, Homo sapiens
  source 1..13: mol_type = genomic DNA
ggcctgggattcg

SEQ ID NO: 42533 - DNA, 15 bp, Homo sapiens
  source 1..15: mol_type = genomic DNA
ggcctgggatccctc

SEQ ID NO: 42534 - DNA, 15 bp, Homo sapiens
  source 1..15: mol_type = genomic DNA
ttgagaaggatgctt

SEQ ID NO: 42535 - DNA, 17 bp, Homo sapiens
  source 1..17: mol_type = genomic DNA
caggaggagctttaggg

SEQ ID NO: 42536 - DNA, 17 bp, Homo sapiens
  source 1..17: mol_type = genomic DNA
tcaggaggagctttagg

SEQ ID NO: 42537 - DNA, 17 bp, Homo sapiens
  source 1..17: mol_type = genomic DNA
ctgcctctccacgcaca

SEQ ID NO: 42538 - DNA, 16 bp, Homo sapiens
  source 1..16: mol_type = genomic DNA
ctcggcattccgaagc

SEQ ID NO: 42539 - DNA, 15 bp, Homo sapiens
  source 1..15: mol_type = genomic DNA
ggggagggcgcccgc

SEQ ID NO: 42540 - DNA, 17 bp, Homo sapiens
  source 1..17: mol_type = genomic DNA
tcccagacccgcccagg

SEQ ID NO: 42541 - DNA, 15 bp, Homo sapiens
  source 1..15: mol_type = genomic DNA
gactgtttggaccca

SEQ ID NO: 42542 - DNA, 16 bp, Homo sapiens
  source 1..16: mol_type = genomic DNA
gtgactgtttggaccc

SEQ ID NO: 42543 - DNA, 14 bp, Homo sapiens
  source 1..14: mol_type = genomic DNA
cagccggggcagcc

SEQ ID NO: 42544 - DNA, 14 bp, Homo sapiens
  source 1..14: mol_type = genomic DNA
caggccggcccaga

SEQ ID NO: 42545 - DNA, 17 bp, Homo sapiens
  source 1..17: mol_type = genomic DNA
tcccaggccggcccaga

SEQ ID NO: 42546 - DNA, 15 bp, Homo sapiens
  source 1..15: mol_type = genomic DNA
ttgagaaggatcctc

SEQ ID NO: 42547 - DNA, 16 bp, Homo sapiens
  source 1..16: mol_type = genomic DNA
tattcagactggtttc

SEQ ID NO: 42548 - DNA, 15 bp, Homo sapiens
  source 1..15: mol_type = genomic DNA
aacgcattccggagc

SEQ ID NO: 42549 - DNA, 15 bp, Homo sapiens
  source 1..15: mol_type = genomic DNA
gcccgggaggagcgg

SEQ ID NO: 42550 - DNA, 15 bp, Homo sapiens
  source 1..15: mol_type = genomic DNA
ctgggccggcccagg

SEQ ID NO: 42551 - DNA, 17 bp, Homo sapiens
  source 1..17: mol_type = genomic DNA
ctggctccaccagccca

SEQ ID NO: 42552 - DNA, 14 bp, Homo sapiens
  source 1..14: mol_type = genomic DNA
ggcgccctggttcc

SEQ ID NO: 42553 - DNA, 14 bp, Homo sapiens
  source 1..14: mol_type = genomic DNA
tgcctgggattctg

SEQ ID NO: 42554 - DNA, 17 bp, Homo sapiens
  source 1..17: mol_type = genomic DNA
tccttctgtgcccttgt

SEQ ID NO: 42555 - DNA, 15 bp, Homo sapiens
  source 1..15: mol_type = genomic DNA
cgcgccctggtcggc

SEQ ID NO: 42556 - DNA, 15 bp, Homo sapiens
  source 1..15: mol_type = genomic DNA
ccggccggggccgcc

SEQ ID NO: 42557 - DNA, 19 bp, Homo sapiens
  source 1..19: mol_type = genomic DNA
cagcctctcccccagcccc

SEQ ID NO: 42558 - DNA, 15 bp, Homo sapiens
  source 1..15: mol_type = genomic DNA
ttgagaaggatgcta

SEQ ID NO: 42559 - DNA, 16 bp, Homo sapiens
  source 1..16: mol_type = genomic DNA
tcctgctggtggatga

SEQ ID NO: 42560 - DNA, 13 bp, Homo sapiens
  source 1..13: mol_type = genomic DNA
ggctgggattccg

SEQ ID NO: 42561 - DNA, 14 bp, Homo sapiens
  source 1..14: mol_type = genomic DNA
cagagccggcgcgg

SEQ ID NO: 42562 - DNA, 16 bp, Homo sapiens
  source 1..16: mol_type = genomic DNA
accctggaggagctgg

SEQ ID NO: 42563 - DNA, 16 bp, Homo sapiens
  source 1..16: mol_type = genomic DNA
ggggcagggcgcccac

SEQ ID NO: 42564 - DNA, 18 bp, Homo sapiens
  source 1..18: mol_type = genomic DNA
ccaccttccgagcctcca

SEQ ID NO: 42565 - DNA, 15 bp, Homo sapiens
  source 1..15: mol_type = genomic DNA
actcctggctggctg

SEQ ID NO: 42566 - DNA, 15 bp, Homo sapiens
  source 1..15: mol_type = genomic DNA
gatggccctccctaa

SEQ ID NO: 42567 - DNA, 16 bp, Homo sapiens
  source 1..16: mol_type = genomic DNA
gccctggaggagctgg

SEQ ID NO: 42568 - DNA, 15 bp, Homo sapiens
  source 1..15: mol_type = genomic DNA
tttctgctgaatgtc

SEQ ID NO: 42569 - DNA, 14 bp, Homo sapiens
  source 1..14: mol_type = genomic DNA
cgggcaagggagcc

SEQ ID NO: 42570 - DNA, 15 bp, Homo sapiens
  source 1..15: mol_type = genomic DNA
tgcgggcaagggagc

SEQ ID NO: 42571 - DNA, 14 bp, Homo sapiens
  source 1..14: mol_type = genomic DNA
ggcctgggattctc

SEQ ID NO: 42572 - DNA, 15 bp, Homo sapiens
  source 1..15: mol_type = genomic DNA
cggcctgggagcctg

SEQ ID NO: 42573 - DNA, 15 bp, Homo sapiens
  source 1..15: mol_type = genomic DNA
caagacggggcagct

SEQ ID NO: 42574 - DNA, 15 bp, Homo sapiens
  source 1..15: mol_type = genomic DNA
cagcgccggcccagc

SEQ ID NO: 42575 - DNA, 15 bp, Homo sapiens
  source 1..15: mol_type = genomic DNA
acacctggctggttc

SEQ ID NO: 42576 - DNA, 15 bp, Homo sapiens
  source 1..15: mol_type = genomic DNA
agacctggctggctt

SEQ ID NO: 42577 - DNA, 16 bp, Homo sapiens
  source 1..16: mol_type = genomic DNA
aagacctggctggctt

SEQ ID NO: 42578 - DNA, 16 bp, Homo sapiens
  source 1..16: mol_type = genomic DNA
cagttgaaggcatccc

SEQ ID NO: 42579 - DNA, 18 bp, Homo sapiens
  source 1..18: mol_type = genomic DNA
gaagacctggctggcttc

SEQ ID NO: 42580 - DNA, 15 bp, Homo sapiens
  source 1..15: mol_type = genomic DNA
agggatcccagaggc

SEQ ID NO: 42581 - DNA, 14 bp, Homo sapiens
  source 1..14: mol_type = genomic DNA
gctgctgctggtga

SEQ ID NO: 42582 - DNA, 15 bp, Homo sapiens
  source 1..15: mol_type = genomic DNA
ctggaggagctttaa

SEQ ID NO: 42583 - DNA, 15 bp, Homo sapiens
  source 1..15: mol_type = genomic DNA
tggaggagctttaac

SEQ ID NO: 42584 - DNA, 17 bp, Homo sapiens
  source 1..17: mol_type = genomic DNA
ctgggattcctgcttgt

SEQ ID NO: 42585 - DNA, 18 bp, Homo sapiens
  source 1..18: mol_type = genomic DNA
ctgcctcttctcagccca

SEQ ID NO: 42586 - DNA, 15 bp, Homo sapiens
  source 1..15: mol_type = genomic DNA
gcctgctgctgatta

SEQ ID NO: 42587 - DNA, 15 bp, Homo sapiens
  source 1..15: mol_type = genomic DNA
ggggatcccacagtc

SEQ ID NO: 42588 - DNA, 18 bp, Homo sapiens
  source 1..18: mol_type = genomic DNA
cagggatctgctggagga

SEQ ID NO: 42589 - DNA, 15 bp, Homo sapiens
  source 1..15: mol_type = genomic DNA
atggccctcccaacc

SEQ ID NO: 42590 - DNA, 14 bp, Homo sapiens
  source 1..14: mol_type = genomic DNA
gcgctgctggatga

SEQ ID NO: 42591 - DNA, 14 bp, Homo sapiens
  source 1..14: mol_type = genomic DNA
gggccctggtcttc

SEQ ID NO: 42592 - DNA, 17 bp, Homo sapiens
  source 1..17: mol_type = genomic DNA
ctgggatactgccttct

SEQ ID NO: 42593 - DNA, 15 bp, Homo sapiens
  source 1..15: mol_type = genomic DNA
gcccgggaggggtgg

SEQ ID NO: 42594 - DNA, 19 bp, Homo sapiens
  source 1..19: mol_type = genomic DNA
ccctgggttcctatagaag

SEQ ID NO: 42595 - DNA, 15 bp, Homo sapiens
  source 1..15: mol_type = genomic DNA
gctgctgctggagga

SEQ ID NO: 42596 - DNA, 15 bp, Homo sapiens
  source 1..15: mol_type = genomic DNA
accttccgacacttc

SEQ ID NO: 42597 - DNA, 14 bp, Homo sapiens
  source 1..14: mol_type = genomic DNA
gcccgaggagctgg

SEQ ID NO: 42598 - DNA, 15 bp, Homo sapiens
  source 1..15: mol_type = genomic DNA
cggcctgggagtctg

SEQ ID NO: 42599 - DNA, 15 bp, Homo sapiens
  source 1..15: mol_type = genomic DNA
ccctcctttcctggg

SEQ ID NO: 42600 - DNA, 14 bp, Homo sapiens
  source 1..14: mol_type = genomic DNA
atctggtttcagac

SEQ ID NO: 42601 - DNA, 16 bp, Homo sapiens
  source 1..16: mol_type = genomic DNA
gcccgggaggagccag

SEQ ID NO: 42602 - DNA, 14 bp, Homo sapiens
  source 1..14: mol_type = genomic DNA
ggggtcccagagcc

SEQ ID NO: 42603 - DNA, 15 bp, Homo sapiens
  source 1..15: mol_type = genomic DNA
aggggtcccagagcc

SEQ ID NO: 42604 - DNA, 16 bp, Homo sapiens
  source 1..16: mol_type = genomic DNA
cggggatcccggaggc

SEQ ID NO: 42605 - DNA, 15 bp, Homo sapiens
  source 1..15: mol_type = genomic DNA
ggcaccctggtctgt

SEQ ID NO: 42606 - DNA, 16 bp, Homo sapiens
  source 1..16: mol_type = genomic DNA
ggagggccagcacccg

SEQ ID NO: 42607 - DNA, 15 bp, Homo sapiens
  source 1..15: mol_type = genomic DNA
ggcctggcattcctg

SEQ ID NO: 42608 - DNA, 16 bp, Homo sapiens
  source 1..16: mol_type = genomic DNA
gggcctggcattcctg

SEQ ID NO: 42609 - DNA, 15 bp, Homo sapiens
  source 1..15: mol_type = genomic DNA
ggggatcccacagcc

SEQ ID NO: 42610 - DNA, 16 bp, Homo sapiens
  source 1..16: mol_type = genomic DNA
gggggatcccacagcc

SEQ ID NO: 42611 - DNA, 18 bp, Homo sapiens
  source 1..18: mol_type = genomic DNA
ctgcctcccaccagtcta

SEQ ID NO: 42612 - DNA, 13 bp, Homo sapiens
  source 1..13: mol_type = genomic DNA
caacggggcagct

SEQ ID NO: 42613 - DNA, 14 bp, Homo sapiens
  source 1..14: mol_type = genomic DNA
gaagcggggcagct

SEQ ID NO: 42614 - DNA, 18 bp, Homo sapiens
  source 1..18: mol_type = genomic DNA
cagggctctgctggagca

SEQ ID NO: 42615 - DNA, 19 bp, Homo sapiens
  source 1..19: mol_type = genomic DNA
ctgcctctgctccagcccc

SEQ ID NO: 42616 - DNA, 15 bp, Homo sapiens
  source 1..15: mol_type = genomic DNA
ccgactttctgcagc

SEQ ID NO: 42617 - DNA, 13 bp, Homo sapiens
  source 1..13: mol_type = genomic DNA
caccttccgagtg

SEQ ID NO: 42618 - DNA, 14 bp, Homo sapiens
  source 1..14: mol_type = genomic DNA
caccttccgagtgt

SEQ ID NO: 42619 - DNA, 13 bp, Homo sapiens
  source 1..13: mol_type = genomic DNA
caccttccgagtg

SEQ ID NO: 42620 - DNA, 14 bp, Homo sapiens
  source 1..14: mol_type = genomic DNA
caccttccgagtgt

SEQ ID NO: 42621 - DNA, 16 bp, Homo sapiens
  source 1..16: mol_type = genomic DNA
gggagctgtggcctct

SEQ ID NO: 42622 - DNA, 15 bp, Homo sapiens
  source 1..15: mol_type = genomic DNA
gtgaatcccagagcc

SEQ ID NO: 42623 - DNA, 17 bp, Homo sapiens
  source 1..17: mol_type = genomic DNA
aggaggagctttacgac

SEQ ID NO: 42624 - DNA, 15 bp, Homo sapiens
  source 1..15: mol_type = genomic DNA
ggggccctggtctgg

SEQ ID NO: 42625 - DNA, 15 bp, Homo sapiens
  source 1..15: mol_type = genomic DNA
gctttctttcctggt

SEQ ID NO: 42626 - DNA, 14 bp, Homo sapiens
  source 1..14: mol_type = genomic DNA
ggcgccctggccgc

SEQ ID NO: 42627 - DNA, 14 bp, Homo sapiens
  source 1..14: mol_type = genomic DNA
gcgggaggagctgg

SEQ ID NO: 42628 - DNA, 13 bp, Homo sapiens
  source 1..13: mol_type = genomic DNA
acacctggctgta

SEQ ID NO: 42629 - DNA, 15 bp, Homo sapiens
  source 1..15: mol_type = genomic DNA
ggcctgggatccctg

SEQ ID NO: 42630 - DNA, 16 bp, Homo sapiens
  source 1..16: mol_type = genomic DNA
gggcctgggatccctg

SEQ ID NO: 42631 - DNA, 16 bp, Homo sapiens
  source 1..16: mol_type = genomic DNA
gtccaggaggagctgg

SEQ ID NO: 42632 - DNA, 15 bp, Homo sapiens
  source 1..15: mol_type = genomic DNA
ccgttctttcctgga

SEQ ID NO: 42633 - DNA, 14 bp, Homo sapiens
  source 1..14: mol_type = genomic DNA
gcctgctgctggga

SEQ ID NO: 42634 - DNA, 19 bp, Homo sapiens
  source 1..19: mol_type = genomic DNA
ccacccctccaccagccca

SEQ ID NO: 42635 - DNA, 14 bp, Homo sapiens
  source 1..14: mol_type = genomic DNA
cagcccggcccagg

SEQ ID NO: 42636 - DNA, 15 bp, Homo sapiens
  source 1..15: mol_type = genomic DNA
gcatgctgctggaga

SEQ ID NO: 42637 - DNA, 13 bp, Homo sapiens
  source 1..13: mol_type = genomic DNA
ggcctgggatttg

SEQ ID NO: 42638 - DNA, 14 bp, Homo sapiens
  source 1..14: mol_type = genomic DNA
acacctggctgctg

SEQ ID NO: 42639 - DNA, 14 bp, Homo sapiens
  source 1..14: mol_type = genomic DNA
ccagaccgcccggt

SEQ ID NO: 42640 - DNA, 15 bp, Homo sapiens
  source 1..15: mol_type = genomic DNA
gcccgggaggagtgt

SEQ ID NO: 42641 - DNA, 15 bp, Homo sapiens
  source 1..15: mol_type = genomic DNA
tcacctggctggctg

SEQ ID NO: 42642 - DNA, 13 bp, Homo sapiens
  source 1..13: mol_type = genomic DNA
ccaccgccctgct

SEQ ID NO: 42643 - DNA, 16 bp, Homo sapiens
  source 1..16: mol_type = genomic DNA
gaccgggaggagctgt

SEQ ID NO: 42644 - DNA, 16 bp, Homo sapiens
  source 1..16: mol_type = genomic DNA
gaccgggaggagctgt

SEQ ID NO: 42645 - DNA, 16 bp, Homo sapiens
  source 1..16: mol_type = genomic DNA
gaccgggaggagctgt

SEQ ID NO: 42646 - DNA, 16 bp, Homo sapiens
  source 1..16: mol_type = genomic DNA
gaccgggaggagctgt

SEQ ID NO: 42647 - DNA, 16 bp, Homo sapiens
  source 1..16: mol_type = genomic DNA
gaccgggaggagctgt

SEQ ID NO: 42648 - DNA, 17 bp, Homo sapiens
  source 1..17: mol_type = genomic DNA
tggcgggtctccgcccc

SEQ ID NO: 42649 - DNA, 14 bp, Homo sapiens
  source 1..14: mol_type = genomic DNA
gccggaggagctgg

SEQ ID NO: 42650 - DNA, 15 bp, Homo sapiens
  source 1..15: mol_type = genomic DNA
gtggaaggatcgctt

SEQ ID NO: 42651 - DNA, 16 bp, Homo sapiens
  source 1..16: mol_type = genomic DNA
gcctgctgctggctgc

SEQ ID NO: 42652 - DNA, 15 bp, Homo sapiens
  source 1..15: mol_type = genomic DNA
ggagtgcagagattg

SEQ ID NO: 42653 - DNA, 15 bp, Homo sapiens
  source 1..15: mol_type = genomic DNA
tccaccagctgaggc

SEQ ID NO: 42654 - DNA, 15 bp, Homo sapiens
  source 1..15: mol_type = genomic DNA
tgggatcccagaacc

SEQ ID NO: 42655 - DNA, 16 bp, Homo sapiens
  source 1..16: mol_type = genomic DNA
ctgggatcccagaacc

SEQ ID NO: 42656 - DNA, 15 bp, Homo sapiens
  source 1..15: mol_type = genomic DNA
tctttctttcctgag

SEQ ID NO: 42657 - DNA, 16 bp, Homo sapiens
  source 1..16: mol_type = genomic DNA
ggcctggaggagctgg

SEQ ID NO: 42658 - DNA, 19 bp, Homo sapiens
  source 1..19: mol_type = genomic DNA
gtccctctccaccaaccca

SEQ ID NO: 42659 - DNA, 14 bp, Homo sapiens
  source 1..14: mol_type = genomic DNA
gcttctttcctggg

SEQ ID NO: 42660 - DNA, 16 bp, Homo sapiens
  source 1..16: mol_type = genomic DNA
tcacgccagctgaggt

SEQ ID NO: 42661 - DNA, 15 bp, Homo sapiens
  source 1..15: mol_type = genomic DNA
actccactcctggag

SEQ ID NO: 42662 - DNA, 18 bp, Homo sapiens
  source 1..18: mol_type = genomic DNA
ctgctctccaccagctct

SEQ ID NO: 42663 - DNA, 18 bp, Homo sapiens
  source 1..18: mol_type = genomic DNA
atgggatgcctgccttct

SEQ ID NO: 42664 - DNA, 14 bp, Homo sapiens
  source 1..14: mol_type = genomic DNA
caggccggcccagt

SEQ ID NO: 42665 - DNA, 14 bp, Homo sapiens
  source 1..14: mol_type = genomic DNA
ccagaccgccagct

SEQ ID NO: 42666 - DNA, 14 bp, Homo sapiens
  source 1..14: mol_type = genomic DNA
tagccagctgaggc

SEQ ID NO: 42667 - DNA, 13 bp, Homo sapiens
  source 1..13: mol_type = genomic DNA
cagcggggcagct

SEQ ID NO: 42668 - DNA, 19 bp, Homo sapiens
  source 1..19: mol_type = genomic DNA
ctgcctctgccccagcccc

SEQ ID NO: 42669 - DNA, 15 bp, Homo sapiens
  source 1..15: mol_type = genomic DNA
ccccgggagagctgg

SEQ ID NO: 42670 - DNA, 15 bp, Homo sapiens
  source 1..15: mol_type = genomic DNA
caggtcggggcagct

SEQ ID NO: 42671 - DNA, 16 bp, Homo sapiens
  source 1..16: mol_type = genomic DNA
ccggccggggcccgcc

SEQ ID NO: 42672 - DNA, 17 bp, Homo sapiens
  source 1..17: mol_type = genomic DNA
agctcctggcctctctg

SEQ ID NO: 42673 - DNA, 18 bp, Homo sapiens
  source 1..18: mol_type = genomic DNA
ccagggggagctggtggc

SEQ ID NO: 42674 - DNA, 15 bp, Homo sapiens
  source 1..15: mol_type = genomic DNA
acaccttccgacact

SEQ ID NO: 42675 - DNA, 15 bp, Homo sapiens
  source 1..15: mol_type = genomic DNA
caccttccgacactg

SEQ ID NO: 42676 - DNA, 16 bp, Homo sapiens
  source 1..16: mol_type = genomic DNA
acaccttccgacactg

SEQ ID NO: 42677 - DNA, 16 bp, Homo sapiens
  source 1..16: mol_type = genomic DNA
caccttccgacactgg

SEQ ID NO: 42678 - DNA, 16 bp, Homo sapiens
  source 1..16: mol_type = genomic DNA
acctgctgctggatga

SEQ ID NO: 42679 - DNA, 16 bp, Homo sapiens
  source 1..16: mol_type = genomic DNA
cggggatcccggagct

SEQ ID NO: 42680 - DNA, 15 bp, Homo sapiens
  source 1..15: mol_type = genomic DNA
cggaatcccagagcc

SEQ ID NO: 42681 - DNA, 15 bp, Homo sapiens
  source 1..15: mol_type = genomic DNA
cggaatcccagagcc

SEQ ID NO: 42682 - DNA, 17 bp, Homo sapiens
  source 1..17: mol_type = genomic DNA
ctgcctcctccagccca

SEQ ID NO: 42683 - DNA, 15 bp, Homo sapiens
  source 1..15: mol_type = genomic DNA
ccgagccggcccagg

SEQ ID NO: 42684 - DNA, 16 bp, Homo sapiens
  source 1..16: mol_type = genomic DNA
gcccgggaggggcggg

SEQ ID NO: 42685 - DNA, 17 bp, Homo sapiens
  source 1..17: mol_type = genomic DNA
ctgggatcctgccttca

SEQ ID NO: 42686 - DNA, 17 bp, Homo sapiens
  source 1..17: mol_type = genomic DNA
ctgggatcctgccttca

SEQ ID NO: 42687 - DNA, 17 bp, Homo sapiens
  source 1..17: mol_type = genomic DNA
ctgggatcctgccttca

SEQ ID NO: 42688 - DNA, 17 bp, Homo sapiens
  source 1..17: mol_type = genomic DNA
ctgggatcctgccttca

SEQ ID NO: 42689 - DNA, 15 bp, Homo sapiens
  source 1..15: mol_type = genomic DNA
ctgtggatcctgaga

SEQ ID NO: 42690 - DNA, 15 bp, Homo sapiens
  source 1..15: mol_type = genomic DNA
cctggccgccctgct

SEQ ID NO: 42691 - DNA, 16 bp, Homo sapiens
  source 1..16: mol_type = genomic DNA
ctgttccaccagccca

SEQ ID NO: 42692 - DNA, 15 bp, Homo sapiens
  source 1..15: mol_type = genomic DNA
cagggccggcccagg

SEQ ID NO: 42693 - DNA, 16 bp, Homo sapiens
  source 1..16: mol_type = genomic DNA
gcccaggaggagctga

SEQ ID NO: 42694 - DNA, 15 bp, Homo sapiens
  source 1..15: mol_type = genomic DNA
gctgctgctggagga

SEQ ID NO: 42695 - DNA, 16 bp, Homo sapiens
  source 1..16: mol_type = genomic DNA
gccctggaggagctgc

SEQ ID NO: 42696 - DNA, 16 bp, Homo sapiens
  source 1..16: mol_type = genomic DNA
gccctggaggagctgc

SEQ ID NO: 42697 - DNA, 15 bp, Homo sapiens
  source 1..15: mol_type = genomic DNA
ggcgccctgggctgc

SEQ ID NO: 42698 - DNA, 15 bp, Homo sapiens
  source 1..15: mol_type = genomic DNA
cagagccggcgcagg

SEQ ID NO: 42699 - DNA, 15 bp, Homo sapiens
  source 1..15: mol_type = genomic DNA
ccgggccggcccagg

SEQ ID NO: 42700 - DNA, 15 bp, Homo sapiens
  source 1..15: mol_type = genomic DNA
gctctctttcctggg

SEQ ID NO: 42701 - DNA, 15 bp, Homo sapiens
  source 1..15: mol_type = genomic DNA
ccaggccgccctgct

SEQ ID NO: 42702 - DNA, 13 bp, Homo sapiens
  source 1..13: mol_type = genomic DNA
ccgaccgccctgt

SEQ ID NO: 42703 - DNA, 15 bp, Homo sapiens
  source 1..15: mol_type = genomic DNA
gttctggctgaagtc

SEQ ID NO: 42704 - DNA, 17 bp, Homo sapiens
  source 1..17: mol_type = genomic DNA
taacttgtctgtctttg

SEQ ID NO: 42705 - DNA, 15 bp, Homo sapiens
  source 1..15: mol_type = genomic DNA
gtctgctgctggtga

SEQ ID NO: 42706 - DNA, 14 bp, Homo sapiens
  source 1..14: mol_type = genomic DNA
cgagccggccccgg

SEQ ID NO: 42707 - DNA, 15 bp, Homo sapiens
  source 1..15: mol_type = genomic DNA
ctcgcggagaacggc

SEQ ID NO: 42708 - DNA, 16 bp, Homo sapiens
  source 1..16: mol_type = genomic DNA
cacaatatcccctgtg

SEQ ID NO: 42709 - DNA, 16 bp, Homo sapiens
  source 1..16: mol_type = genomic DNA
gcccgggaggagccgg

SEQ ID NO: 42710 - DNA, 16 bp, Homo sapiens
  source 1..16: mol_type = genomic DNA
accagggaggagctgg

SEQ ID NO: 42711 - DNA, 14 bp, Homo sapiens
  source 1..14: mol_type = genomic DNA
gggcgggcgcccgc

SEQ ID NO: 42712 - DNA, 16 bp, Homo sapiens
  source 1..16: mol_type = genomic DNA
gtccgggaggagcggg

SEQ ID NO: 42713 - DNA, 14 bp, Homo sapiens
  source 1..14: mol_type = genomic DNA
cgggccggcccagg

SEQ ID NO: 42714 - DNA, 16 bp, Homo sapiens
  source 1..16: mol_type = genomic DNA
gcgctggaggagctgg

SEQ ID NO: 42715 - DNA, 15 bp, Homo sapiens
  source 1..15: mol_type = genomic DNA
gggcgtgcccgcccc

SEQ ID NO: 42716 - DNA, 15 bp, Homo sapiens
  source 1..15: mol_type = genomic DNA
gaagggccgcacccg

SEQ ID NO: 42717 - DNA, 17 bp, Homo sapiens
  source 1..17: mol_type = genomic DNA
gtgcgtgtccccgcccc

SEQ ID NO: 42718 - DNA, 15 bp, Homo sapiens
  source 1..15: mol_type = genomic DNA
ggcggtcccagagcc

SEQ ID NO: 42719 - DNA, 15 bp, Homo sapiens
  source 1..15: mol_type = genomic DNA
ccacctggctggctg

SEQ ID NO: 42720 - DNA, 14 bp, Homo sapiens
  source 1..14: mol_type = genomic DNA
ccagaccgccggct

SEQ ID NO: 42721 - DNA, 15 bp, Homo sapiens
  source 1..15: mol_type = genomic DNA
ggcgccctggcccgc

SEQ ID NO: 42722 - DNA, 14 bp, Homo sapiens
  source 1..14: mol_type = genomic DNA
caagccggggagcg

SEQ ID NO: 42723 - DNA, 16 bp, Homo sapiens
  source 1..16: mol_type = genomic DNA
cctgagtttctgcggc

SEQ ID NO: 42724 - DNA, 15 bp, Homo sapiens
  source 1..15: mol_type = genomic DNA
gcccagaggagctgg

SEQ ID NO: 42725 - DNA, 15 bp, Homo sapiens
  source 1..15: mol_type = genomic DNA
acctgctgctggaga

SEQ ID NO: 42726 - DNA, 14 bp, Homo sapiens
  source 1..14: mol_type = genomic DNA
tgcatgcaagggag

SEQ ID NO: 42727 - DNA, 15 bp, Homo sapiens
  source 1..15: mol_type = genomic DNA
agacctggctggcca

SEQ ID NO: 42728 - DNA, 16 bp, Homo sapiens
  source 1..16: mol_type = genomic DNA
aagacctggctggcca

SEQ ID NO: 42729 - DNA, 14 bp, Homo sapiens
  source 1..14: mol_type = genomic DNA
aacctggctggcca

SEQ ID NO: 42730 - DNA, 15 bp, Homo sapiens
  source 1..15: mol_type = genomic DNA
ggcggtcccagagcc

SEQ ID NO: 42731 - DNA, 16 bp, Homo sapiens
  source 1..16: mol_type = genomic DNA
cggcggtcccagagcc

SEQ ID NO: 42732 - DNA, 19 bp, Homo sapiens
  source 1..19: mol_type = genomic DNA
ccaccttggatgctgtctc

SEQ ID NO: 42733 - DNA, 14 bp, Homo sapiens
  source 1..14: mol_type = genomic DNA
gctgctgctggaga

SEQ ID NO: 42734 - DNA, 14 bp, Homo sapiens
  source 1..14: mol_type = genomic DNA
gctgctgctggaga

SEQ ID NO: 42735 - DNA, 15 bp, Homo sapiens
  source 1..15: mol_type = genomic DNA
gccctgaggagctgg

SEQ ID NO: 42736 - DNA, 16 bp, Homo sapiens
  source 1..16: mol_type = genomic DNA
gccctggaggagctgg

SEQ ID NO: 42737 - DNA, 14 bp, Homo sapiens
  source 1..14: mol_type = genomic DNA
ggaccctggtctgc

SEQ ID NO: 42738 - DNA, 14 bp, Homo sapiens
  source 1..14: mol_type = genomic DNA
tgcgcctggtctgc

SEQ ID NO: 42739 - DNA, 14 bp, Homo sapiens
  source 1..14: mol_type = genomic DNA
ggcagggattcctg

SEQ ID NO: 42740 - DNA, 15 bp, Homo sapiens
  source 1..15: mol_type = genomic DNA
tggtgcagagatacg

SEQ ID NO: 42741 - DNA, 16 bp, Homo sapiens
  source 1..16: mol_type = genomic DNA
gcccgagaggagctgg

SEQ ID NO: 42742 - DNA, 15 bp, Homo sapiens
  source 1..15: mol_type = genomic DNA
cggggatccagagcc

SEQ ID NO: 42743 - DNA, 17 bp, Homo sapiens
  source 1..17: mol_type = genomic DNA
cccggggatccagagcc

SEQ ID NO: 42744 - DNA, 17 bp, Homo sapiens
  source 1..17: mol_type = genomic DNA
ccggggatccagagccc

SEQ ID NO: 42745 - DNA, 17 bp, Homo sapiens
  source 1..17: mol_type = genomic DNA
ctggccccaccagccca

SEQ ID NO: 42746 - DNA, 16 bp, Homo sapiens
  source 1..16: mol_type = genomic DNA
cctggataattagtgc

SEQ ID NO: 42747 - DNA, 17 bp, Homo sapiens
  source 1..17: mol_type = genomic DNA
gagactcttttggacca

SEQ ID NO: 42748 - DNA, 18 bp, Homo sapiens
  source 1..18: mol_type = genomic DNA
gtccctctccccagccca

SEQ ID NO: 42749 - DNA, 15 bp, Homo sapiens
  source 1..15: mol_type = genomic DNA
gtcgccctggtctga

SEQ ID NO: 42750 - DNA, 17 bp, Homo sapiens
  source 1..17: mol_type = genomic DNA
tggaggacctttaggtc

SEQ ID NO: 42751 - DNA, 13 bp, Homo sapiens
  source 1..13: mol_type = genomic DNA
cagcggggcagct

SEQ ID NO: 42752 - DNA, 14 bp, Homo sapiens
  source 1..14: mol_type = genomic DNA
gcctgctgctggga

SEQ ID NO: 42753 - DNA, 15 bp, Homo sapiens
  source 1..15: mol_type = genomic DNA
tctgtctttcctggg

SEQ ID NO: 42754 - DNA, 15 bp, Homo sapiens
  source 1..15: mol_type = genomic DNA
ccggccggggccccc

SEQ ID NO: 42755 - DNA, 15 bp, Homo sapiens
  source 1..15: mol_type = genomic DNA
gcccagaggagctgg

SEQ ID NO: 42756 - DNA, 15 bp, Homo sapiens
  source 1..15: mol_type = genomic DNA
ccggccggggtcccc

SEQ ID NO: 42757 - DNA, 13 bp, Homo sapiens
  source 1..13: mol_type = genomic DNA
tgctgcaagggag

SEQ ID NO: 42758 - DNA, 15 bp, Homo sapiens
  source 1..15: mol_type = genomic DNA
gcctgctgctggaaa

SEQ ID NO: 42759 - DNA, 13 bp, Homo sapiens
  source 1..13: mol_type = genomic DNA
cctctttcctggg

SEQ ID NO: 42760 - DNA, 18 bp, Homo sapiens
  source 1..18: mol_type = genomic DNA
cctccctgtgggtccgat

SEQ ID NO: 42761 - DNA, 17 bp, Homo sapiens
  source 1..17: mol_type = genomic DNA
gagagttacatccctgg

SEQ ID NO: 42762 - DNA, 17 bp, Homo sapiens
  source 1..17: mol_type = genomic DNA
ggctggcagggaggggc

SEQ ID NO: 42763 - DNA, 17 bp, Homo sapiens
  source 1..17: mol_type = genomic DNA
cccggggacccagagtc

SEQ ID NO: 42764 - DNA, 15 bp, Homo sapiens
  source 1..15: mol_type = genomic DNA
tgggatcccagcgcc

SEQ ID NO: 42765 - DNA, 19 bp, Homo sapiens
  source 1..19: mol_type = genomic DNA
ctccctccccaccagcccc

SEQ ID NO: 42766 - DNA, 15 bp, Homo sapiens
  source 1..15: mol_type = genomic DNA
gaggatcccagaccc

SEQ ID NO: 42767 - DNA, 15 bp, Homo sapiens
  source 1..15: mol_type = genomic DNA
gcctgctgctgatca

SEQ ID NO: 42768 - DNA, 18 bp, Homo sapiens
  source 1..18: mol_type = genomic DNA
tacgtctgtctgtctttg

SEQ ID NO: 42769 - DNA, 15 bp, Homo sapiens
  source 1..15: mol_type = genomic DNA
gctttctttcctgag

SEQ ID NO: 42770 - DNA, 16 bp, Homo sapiens
  source 1..16: mol_type = genomic DNA
attctggctgactgtg

SEQ ID NO: 42771 - DNA, 15 bp, Homo sapiens
  source 1..15: mol_type = genomic DNA
tcccgggaggagcgg

SEQ ID NO: 42772 - DNA, 16 bp, Homo sapiens
  source 1..16: mol_type = genomic DNA
taagggccaggccccg

SEQ ID NO: 42773 - DNA, 17 bp, Homo sapiens
  source 1..17: mol_type = genomic DNA
gggagctcgctggtcct

SEQ ID NO: 42774 - DNA, 15 bp, Homo sapiens
  source 1..15: mol_type = genomic DNA
cctggatgattttgc

SEQ ID NO: 42775 - DNA, 16 bp, Homo sapiens
  source 1..16: mol_type = genomic DNA
acctgctgctggagga

SEQ ID NO: 42776 - DNA, 15 bp, Homo sapiens
  source 1..15: mol_type = genomic DNA
gccgggaggagcggg

SEQ ID NO: 42777 - DNA, 15 bp, Homo sapiens
  source 1..15: mol_type = genomic DNA
ggccggaggagctgg

SEQ ID NO: 42778 - DNA, 17 bp, Homo sapiens
  source 1..17: mol_type = genomic DNA
gaaatctggctggctac

SEQ ID NO: 42779 - DNA, 14 bp, Homo sapiens
  source 1..14: mol_type = genomic DNA
ggcgccctgggtgc

SEQ ID NO: 42780 - DNA, 16 bp, Homo sapiens
  source 1..16: mol_type = genomic DNA
ctggaggagctaagga

SEQ ID NO: 42781 - DNA, 13 bp, Homo sapiens
  source 1..13: mol_type = genomic DNA
ccgccgccctgct

SEQ ID NO: 42782 - DNA, 13 bp, Homo sapiens
  source 1..13: mol_type = genomic DNA
ctcaagggagctc

SEQ ID NO: 42783 - DNA, 15 bp, Homo sapiens
  source 1..15: mol_type = genomic DNA
agccactccgcggag

SEQ ID NO: 42784 - DNA, 16 bp, Homo sapiens
  source 1..16: mol_type = genomic DNA
gaccaggaggagctgg

SEQ ID NO: 42785 - DNA, 18 bp, Homo sapiens
  source 1..18: mol_type = genomic DNA
ccaggaggagctggaggc

SEQ ID NO: 42786 - DNA, 14 bp, Homo sapiens
  source 1..14: mol_type = genomic DNA
ggcccctggtctgc

SEQ ID NO: 42787 - DNA, 15 bp, Homo sapiens
  source 1..15: mol_type = genomic DNA
gagagccggcccagc

SEQ ID NO: 42788 - DNA, 14 bp, Homo sapiens
  source 1..14: mol_type = genomic DNA
ggcgccctggcttc

SEQ ID NO: 42789 - DNA, 17 bp, Homo sapiens
  source 1..17: mol_type = genomic DNA
cagcgaggaagaaacct

SEQ ID NO: 42790 - DNA, 15 bp, Homo sapiens
  source 1..15: mol_type = genomic DNA
gggcagggcgccggc

SEQ ID NO: 42791 - DNA, 15 bp, Homo sapiens
  source 1..15: mol_type = genomic DNA
ccagccggggcagct

SEQ ID NO: 42792 - DNA, 15 bp, Homo sapiens
  source 1..15: mol_type = genomic DNA
ggccccctggtctgt

SEQ ID NO: 42793 - DNA, 17 bp, Homo sapiens
  source 1..17: mol_type = genomic DNA
cccgggggagctggggc

SEQ ID NO: 42794 - DNA, 14 bp, Homo sapiens
  source 1..14: mol_type = genomic DNA
acacctggcttcta

SEQ ID NO: 42795 - DNA, 16 bp, Homo sapiens
  source 1..16: mol_type = genomic DNA
gcagggccaggccccg

SEQ ID NO: 42796 - DNA, 16 bp, Homo sapiens
  source 1..16: mol_type = genomic DNA
gaagggccaggaccag

SEQ ID NO: 42797 - DNA, 16 bp, Homo sapiens
  source 1..16: mol_type = genomic DNA
tgacgccagctgatgc

SEQ ID NO: 42798 - DNA, 15 bp, Homo sapiens
  source 1..15: mol_type = genomic DNA
agacctggctggcca

SEQ ID NO: 42799 - DNA, 14 bp, Homo sapiens
  source 1..14: mol_type = genomic DNA
ggcctgggatgctg

SEQ ID NO: 42800 - DNA, 14 bp, Homo sapiens
  source 1..14: mol_type = genomic DNA
tgggatcccagacc

SEQ ID NO: 42801 - DNA, 15 bp, Homo sapiens
  source 1..15: mol_type = genomic DNA
ctgggatcccagacc

SEQ ID NO: 42802 - DNA, 15 bp, Homo sapiens
  source 1..15: mol_type = genomic DNA
gtggaaggatcgctt

SEQ ID NO: 42803 - DNA, 16 bp, Homo sapiens
  source 1..16: mol_type = genomic DNA
gggaggagcttaggac

SEQ ID NO: 42804 - DNA, 15 bp, Homo sapiens
  source 1..15: mol_type = genomic DNA
tgcagagaatgtcac

SEQ ID NO: 42805 - DNA, 17 bp, Homo sapiens
  source 1..17: mol_type = genomic DNA
tgcagagaatgtcacca

SEQ ID NO: 42806 - DNA, 15 bp, Homo sapiens
  source 1..15: mol_type = genomic DNA
tcccatggatcctat

SEQ ID NO: 42807 - DNA, 15 bp, Homo sapiens
  source 1..15: mol_type = genomic DNA
tgcagagtatgtcac

SEQ ID NO: 42808 - DNA, 17 bp, Homo sapiens
  source 1..17: mol_type = genomic DNA
tgcagagtatgtcacca

SEQ ID NO: 42809 - DNA, 19 bp, Homo sapiens
  source 1..19: mol_type = genomic DNA
ctgcctctccacctgcacc

SEQ ID NO: 42810 - DNA, 16 bp, Homo sapiens
  source 1..16: mol_type = genomic DNA
ccgggctgctggagga

SEQ ID NO: 42811 - DNA, 17 bp, Homo sapiens
  source 1..17: mol_type = genomic DNA
agccgctggcctctctc

SEQ ID NO: 42812 - DNA, 14 bp, Homo sapiens
  source 1..14: mol_type = genomic DNA
ccggccggggcacc

SEQ ID NO: 42813 - DNA, 15 bp, Homo sapiens
  source 1..15: mol_type = genomic DNA
tccagtggatcctat

SEQ ID NO: 42814 - DNA, 15 bp, Homo sapiens
  source 1..15: mol_type = genomic DNA
ccagacctccctgct

SEQ ID NO: 42815 - DNA, 15 bp, Homo sapiens
  source 1..15: mol_type = genomic DNA
ccttcctttcctggg

SEQ ID NO: 42816 - DNA, 15 bp, Homo sapiens
  source 1..15: mol_type = genomic DNA
cctttctttccttgg

SEQ ID NO: 42817 - DNA, 15 bp, Homo sapiens
  source 1..15: mol_type = genomic DNA
atggcagggcgcccc

SEQ ID NO: 42818 - DNA, 15 bp, Homo sapiens
  source 1..15: mol_type = genomic DNA
gcagctggctggcta

SEQ ID NO: 42819 - DNA, 15 bp, Homo sapiens
  source 1..15: mol_type = genomic DNA
gcagctggctggcta

SEQ ID NO: 42820 - DNA, 18 bp, Homo sapiens
  source 1..18: mol_type = genomic DNA
cttcctctccaccatcca

SEQ ID NO: 42821 - DNA, 18 bp, Homo sapiens
  source 1..18: mol_type = genomic DNA
ctgcctcccaccagaccc

SEQ ID NO: 42822 - DNA, 15 bp, Homo sapiens
  source 1..15: mol_type = genomic DNA
cgggatcccagagct

SEQ ID NO: 42823 - DNA, 16 bp, Homo sapiens
  source 1..16: mol_type = genomic DNA
ccgggatcccagagct

SEQ ID NO: 42824 - DNA, 18 bp, Homo sapiens
  source 1..18: mol_type = genomic DNA
ccccgggatcccagagct

SEQ ID NO: 42825 - DNA, 15 bp, Homo sapiens
  source 1..15: mol_type = genomic DNA
cggggatccagagct

SEQ ID NO: 42826 - DNA, 17 bp, Homo sapiens
  source 1..17: mol_type = genomic DNA
ccggggatccagagctg

SEQ ID NO: 42827 - DNA, 15 bp, Homo sapiens
  source 1..15: mol_type = genomic DNA
gcctgctgctggtgc

SEQ ID NO: 42828 - DNA, 16 bp, Homo sapiens
  source 1..16: mol_type = genomic DNA
gacagtatcccctgta

SEQ ID NO: 42829 - DNA, 16 bp, Homo sapiens
  source 1..16: mol_type = genomic DNA
agaggtgcaagggagc

SEQ ID NO: 42830 - DNA, 16 bp, Homo sapiens
  source 1..16: mol_type = genomic DNA
gaggtgcaagggagcg

SEQ ID NO: 42831 - DNA, 15 bp, Homo sapiens
  source 1..15: mol_type = genomic DNA
ccagaccgcccagct

SEQ ID NO: 42832 - DNA, 15 bp, Homo sapiens
  source 1..15: mol_type = genomic DNA
ccctgctgctggaga

SEQ ID NO: 42833 - DNA, 15 bp, Homo sapiens
  source 1..15: mol_type = genomic DNA
cggcctgggatccag

SEQ ID NO: 42834 - DNA, 15 bp, Homo sapiens
  source 1..15: mol_type = genomic DNA
ggcgccctgggcagc

SEQ ID NO: 42835 - DNA, 19 bp, Homo sapiens
  source 1..19: mol_type = genomic DNA
gtgtctctccaccagcccc

SEQ ID NO: 42836 - DNA, 14 bp, Homo sapiens
  source 1..14: mol_type = genomic DNA
tgggatcccagacc

SEQ ID NO: 42837 - DNA, 15 bp, Homo sapiens
  source 1..15: mol_type = genomic DNA
ctgggatcccagacc

SEQ ID NO: 42838 - DNA, 15 bp, Homo sapiens
  source 1..15: mol_type = genomic DNA
ccgagccggcccggg

SEQ ID NO: 42839 - DNA, 14 bp, Homo sapiens
  source 1..14: mol_type = genomic DNA
ccagaccccctgct

SEQ ID NO: 42840 - DNA, 16 bp, Homo sapiens
  source 1..16: mol_type = genomic DNA
ccagccggggctcgcc

SEQ ID NO: 42841 - DNA, 15 bp, Homo sapiens
  source 1..15: mol_type = genomic DNA
cctggatgattgtgc

SEQ ID NO: 42842 - DNA, 17 bp, Homo sapiens
  source 1..17: mol_type = genomic DNA
cagggcctgctggagga

SEQ ID NO: 42843 - DNA, 15 bp, Homo sapiens
  source 1..15: mol_type = genomic DNA
gccgcgaggagctgg

SEQ ID NO: 42844 - DNA, 18 bp, Homo sapiens
  source 1..18: mol_type = genomic DNA
tgcagtgatatgtcacaa

SEQ ID NO: 42845 - DNA, 14 bp, Homo sapiens
  source 1..14: mol_type = genomic DNA
ggcccctggtctgc

SEQ ID NO: 42846 - DNA, 15 bp, Homo sapiens
  source 1..15: mol_type = genomic DNA
gccaggaggagctgg

SEQ ID NO: 42847 - DNA, 13 bp, Homo sapiens
  source 1..13: mol_type = genomic DNA
acacctggctgta

SEQ ID NO: 42848 - DNA, 14 bp, Homo sapiens
  source 1..14: mol_type = genomic DNA
aacacctggctgta

SEQ ID NO: 42849 - DNA, 15 bp, Homo sapiens
  source 1..15: mol_type = genomic DNA
agcaccctggtctgc

SEQ ID NO: 42850 - DNA, 16 bp, Homo sapiens
  source 1..16: mol_type = genomic DNA
ccggccggggctcagc

SEQ ID NO: 42851 - DNA, 18 bp, Homo sapiens
  source 1..18: mol_type = genomic DNA
cctggtggagctggaggc

SEQ ID NO: 42852 - DNA, 13 bp, Homo sapiens
  source 1..13: mol_type = genomic DNA
ctgcaagggagtc

SEQ ID NO: 42853 - DNA, 16 bp, Homo sapiens
  source 1..16: mol_type = genomic DNA
gcccgggaggcgcggg

SEQ ID NO: 42854 - DNA, 14 bp, Homo sapiens
  source 1..14: mol_type = genomic DNA
agcctggctggcta

SEQ ID NO: 42855 - DNA, 15 bp, Homo sapiens
  source 1..15: mol_type = genomic DNA
acacctgtctggcta

SEQ ID NO: 42856 - DNA, 16 bp, Homo sapiens
  source 1..16: mol_type = genomic DNA
gacacctgtctggcta

SEQ ID NO: 42857 - DNA, 15 bp, Homo sapiens
  source 1..15: mol_type = genomic DNA
cctttctttcccagg

SEQ ID NO: 42858 - DNA, 15 bp, Homo sapiens
  source 1..15: mol_type = genomic DNA
ccagccagctgaggc

SEQ ID NO: 42859 - DNA, 14 bp, Homo sapiens
  source 1..14: mol_type = genomic DNA
cgagccgccctgct

SEQ ID NO: 42860 - DNA, 14 bp, Homo sapiens
  source 1..14: mol_type = genomic DNA
ccaccttccgagcg

SEQ ID NO: 42861 - DNA, 19 bp, Homo sapiens
  source 1..19: mol_type = genomic DNA
cagcctctccacctgcaca

SEQ ID NO: 42862 - DNA, 15 bp, Homo sapiens
  source 1..15: mol_type = genomic DNA
ccagccggggcagcc

SEQ ID NO: 42863 - DNA, 15 bp, Homo sapiens
  source 1..15: mol_type = genomic DNA
ccagccggggcagcc

SEQ ID NO: 42864 - DNA, 15 bp, Homo sapiens
  source 1..15: mol_type = genomic DNA
ccagccggggcagcc

SEQ ID NO: 42865 - DNA, 16 bp, Homo sapiens
  source 1..16: mol_type = genomic DNA
gagggccaggcaccca

SEQ ID NO: 42866 - DNA, 14 bp, Homo sapiens
  source 1..14: mol_type = genomic DNA
gctgctgctggtga

SEQ ID NO: 42867 - DNA, 13 bp, Homo sapiens
  source 1..13: mol_type = genomic DNA
ctgaagggagctc

SEQ ID NO: 42868 - DNA, 17 bp, Homo sapiens
  source 1..17: mol_type = genomic DNA
acctctcttgcccttgt

SEQ ID NO: 42869 - DNA, 14 bp, Homo sapiens
  source 1..14: mol_type = genomic DNA
cagagccggcccgg

SEQ ID NO: 42870 - DNA, 14 bp, Homo sapiens
  source 1..14: mol_type = genomic DNA
ggcgccctggcggc

SEQ ID NO: 42871 - DNA, 14 bp, Homo sapiens
  source 1..14: mol_type = genomic DNA
ccacctggctggca

SEQ ID NO: 42872 - DNA, 15 bp, Homo sapiens
  source 1..15: mol_type = genomic DNA
gcctggaggagctgg

SEQ ID NO: 42873 - DNA, 16 bp, Homo sapiens
  source 1..16: mol_type = genomic DNA
ccggccggggcgcacg

SEQ ID NO: 42874 - DNA, 15 bp, Homo sapiens
  source 1..15: mol_type = genomic DNA
ggcctgggattcctt

SEQ ID NO: 42875 - DNA, 16 bp, Homo sapiens
  source 1..16: mol_type = genomic DNA
aggcctgggattcctt

SEQ ID NO: 42876 - DNA, 18 bp, Homo sapiens
  source 1..18: mol_type = genomic DNA
cgcctctccaccagcacc

SEQ ID NO: 42877 - DNA, 14 bp, Homo sapiens
  source 1..14: mol_type = genomic DNA
ccggccggcccagg

SEQ ID NO: 42878 - DNA, 14 bp, Homo sapiens
  source 1..14: mol_type = genomic DNA
acccctccgcggag

SEQ ID NO: 42879 - DNA, 15 bp, Homo sapiens
  source 1..15: mol_type = genomic DNA
ggcgccctggccagc

SEQ ID NO: 42880 - DNA, 14 bp, Homo sapiens
  source 1..14: mol_type = genomic DNA
ccttctttcctgga

SEQ ID NO: 42881 - DNA, 15 bp, Homo sapiens
  source 1..15: mol_type = genomic DNA
tgcctgggattcctg

SEQ ID NO: 42882 - DNA, 14 bp, Homo sapiens
  source 1..14: mol_type = genomic DNA
cagagccggcccga

SEQ ID NO: 42883 - DNA, 15 bp, Homo sapiens
  source 1..15: mol_type = genomic DNA
ccagccggggctccc

SEQ ID NO: 42884 - DNA, 15 bp, Homo sapiens
  source 1..15: mol_type = genomic DNA
gcctgctgctgagga

SEQ ID NO: 42885 - DNA, 15 bp, Homo sapiens
  source 1..15: mol_type = genomic DNA
cgggtctcgtttgga

SEQ ID NO: 42886 - DNA, 15 bp, Homo sapiens
  source 1..15: mol_type = genomic DNA
cctttctttcctagt

SEQ ID NO: 42887 - DNA, 14 bp, Homo sapiens
  source 1..14: mol_type = genomic DNA
cagccggggcaggt

SEQ ID NO: 42888 - DNA, 13 bp, Homo sapiens
  source 1..13: mol_type = genomic DNA
aacctggctggta

SEQ ID NO: 42889 - DNA, 16 bp, Homo sapiens
  source 1..16: mol_type = genomic DNA
cgagtgcagagctatg

SEQ ID NO: 42890 - DNA, 14 bp, Homo sapiens
  source 1..14: mol_type = genomic DNA
agcgcctggtctgc

SEQ ID NO: 42891 - DNA, 14 bp, Homo sapiens
  source 1..14: mol_type = genomic DNA
ctggccggcccagg

SEQ ID NO: 42892 - DNA, 14 bp, Homo sapiens
  source 1..14: mol_type = genomic DNA
cagagccgcccagg

SEQ ID NO: 42893 - DNA, 16 bp, Homo sapiens
  source 1..16: mol_type = genomic DNA
gcggccggggctcaca

SEQ ID NO: 42894 - DNA, 18 bp, Homo sapiens
  source 1..18: mol_type = genomic DNA
cccctcagagaggaagaa
